(19) United States
(12) Patent Application Publication
(10) Pub. No.: US 2014/0219992 A1
(43) Pub. Date: Aug. 7, 2014

(54) Metal Sensitive Mutants of Matrix Metalloproteases and uses thereof

(71) Applicants: Rudolph D. Paladini, Encinitas, CA (US); Ge Wei, San Diego, CA (US); H. Michael Shepard, San Diego, CA (US)

(72) Inventors: Rudolph D. Paladini, Encinitas, CA (US); Ge Wei, San Diego, CA (US); H. Michael Shepard, San Diego, CA (US)

(21) Appl. No.: 13/999,061

(22) Filed: Jan. 7, 2014

Related U.S. Application Data
(60) Provisional application No. 61/848,646, filed on Jan. 7, 2013.

(51) Int. Cl. A61K 38/48; A61K 33/06

(52) U.S. Cl. CPC A61K 38/4886; A61K 33/06
USPC 424/94.67

(57) ABSTRACT

Provided herein are methods of using modified matrix metalloprotease (MMP) enzymes that exhibit regulated activity in the presence of calcium. The methods include conditionally controlling the activity of the MMPs through the use of calcium to treat fibrotic diseases or conditions involving a component of the extracellular matrix (ECM).

### RELATED APPLICATIONS

[0001] Benefit of priority is claimed to U.S. Provisional Application Ser. No. 61/848,646, filed Jan. 7, 2013, to Rudolph D. Paladini, Ge Wei, and H. Michael Shepard, entitled “METAL SENSITIVE MUTANTS OF MATRIX METALLOPROTEASES AND USES THEREOF.”

[0002] This application is related to International PCT Application No. (Attorney Dkt. No. 33320.003098.WO01/3098PC), filed the same day herewith, to Rudolph D. Paladini, Ge Wei, and H. Michael Shepard, entitled “METAL SENSITIVE MUTANTS OF MATRIX METALLOPROTEASES AND USES THEREOF,” which also claims priority to U.S. Provisional Application Ser. No. 61/848,646.

[0003] This application also is related to U.S. application Ser. No. 12/660,894, filed Mar. 5, 2010, to Louis Bookbinder, Gregory I. Frost, Gilbert Keller, Gerhard Johann Frey, Hwai Wen Chang and Jay Milton Short, entitled “TEMPERATURE SENSITIVE MUTANTS OF MATRIX METALLOPROTEASES AND USES THEREOF,” which claims priority to U.S. Provisional Application Ser. No. 61/209,366, filed Mar. 6, 2009.

[0004] The subject matter of each of the above-noted applications is incorporated by reference in its entirety.

### INCORPORATION BY REFERENCE OF SEQUENCE LISTING PROVIDED ON COMPACT DISCS

[0005] An electronic version on compact disc (CD-R) of the Sequence Listing is filed herewith in duplicate (labeled Copy #1 and Copy #2), the contents of which are incorporated by reference in their entirety. The computer-readable file on each of the aforementioned compact discs, created on Jan. 7, 2014, is identical, 712 kilobytes in size, and titled 3098SEQ.001.txt.

### FIELD OF THE INVENTION

[0006] Provided herein are methods of using modified matrix metalloprotease (MMP) enzymes that exhibit regulated activity in the presence of calcium. The methods include conditionally controlling the activity of the MMPs through the use of calcium to treat fibrotic diseases or conditions involving a component of the extracellular matrix (ECM).

### BACKGROUND

[0007] The extracellular matrix (ECM) provides structural support for cells and tissues. Defects or changes in the extracellular matrix as a result of excessive deposition or accumulation of ECM components, such as collagen, can lead to fibrotic disease or conditions. Among these are collagen-mediated diseases or conditions characterized by the presence of abundant collagen fibers. Often the only approved treatment for such diseases or conditions is surgery, which can be highly invasive. These include, for example, needle aponeurotomy for the treatment of Dupuytren's syndrome or liposuction for cellulite, which are highly invasive. Other treatments, such as the use of bacterial collagenase, is associated with side effects due to prolonged degradation of collagen. Hence, there is a need for alternative treatments of fibrotic diseases and conditions. Accordingly, it is among the objects herein to provide alternative methods for the treatment of fibrotic diseases and conditions.

### SUMMARY

[0008] Provided are methods of treating a fibrotic disease or condition by administering, to a locus of a subject to be treated, a modified matrix metalloprotease (MMP) or a catalytically active fragment thereof to degrade a component of the extracellular matrix to effect treatment of the disease or condition, wherein the modified MMP contains a modification in an unmodified MMP polypeptide or catalytically active fragment thereof that is an amino acid insertion, deletion or replacement, and the modification confers, to the modified MMP or catalytically active fragment thereof, reduced activity in the presence of physiological levels of extracellular calcium compared to its activity in the presence of a calcium concentration that is greater than the physiological level, whereby the activity of the modified MMP decreases upon exposure to physiological conditions. The methods provided further include administering, at or near the same locus, a composition containing calcium in a concentration that is greater than physiological levels of extracellular calcium, whereby the modified MMP is conditionally active after administration so that the component of the extracellular matrix is degraded for a limited time to thereby treat the disease or condition.

[0009] In any of the methods herein, the modified MMP and calcium composition can be administered separately or together in the same composition. The calcium composition can be administered prior to, intermittently with, subsequently to, or simultaneously with administration of the modified MMP or catalytically active fragment. In examples of methods where the modified MMP and calcium composition are administered together, the administered composition contains the modified MMP and can contain calcium in a concentration that is greater than physiological levels of extracellular calcium. In any of the examples of the methods provided herein, the modified MMP or catalytically active fragment is an active enzyme that cleaves a component of the ECM.

[0010] In any of the methods herein, the modified MMP or catalytically active fragment used in the methods provided herein exhibits reduced activity in the presence of physiological levels of extracellular calcium compared to its activity in the presence of a calcium concentration that is greater than the physiological level. Physiological levels include calcium concentrations of about 1 mM to 1.3 mM calcium. Thus, exemplary calcium concentrations that are greater than physiological levels include, but are not limited to, 1.5 mM to 100 mM, 2 mM to 50 mM, 2 mM to 25 mM, 5 mM to 50 mM, 5 mM to 25 mM, 5 mM to 15 mM, and 8 mM to 12 mM calcium. Exemplary calcium concentrations that are greater than physiological levels also include calcium concentrations that are at least or about at least or 1.5 mM, including at least or about at least 2.0 mM, 2.5 mM, 3.0 mM, 3.5 mM, 4.0 mM, 4.5 mM, 5.0 mM, 5.5 mM, 6.0 mM, 6.5 mM, 7.0 mM, 7.5 mM, 8.0 mM, 8.5, mM, 9.0 mM, 9.5 mM, 10.0 mM, 11 mM, 12 mM, 13 mM, 14 mM, 15 mM, 16 mM, 17 mM, 18 mM, 19 mM and 20 mM. Thus, a composition containing calcium in a concentration that is greater than physiological levels of extracellular calcium includes, but is not limited to, a composition containing 1.5 mM to 100 mM, 2 mM to 50 mM, 2 mM to 25 mM, 5 mM to 50 mM, 5 mM to 25 mM, 5 mM to 15 mM, or 8 mM to 12 mM calcium. Also, a composition containing calcium in a concentration that is greater than physiological levels of extracellular calcium can contain at least or about at least or 1.5 mM, including at least or about at least 2.0 mM, 2.5 mM, 3.0 mM, 3.5 mM, 4.0 mM, 4.5 mM, 5.0 mM, 5.5 mM, 6.0 mM, 6.5 mM, 7.0 mM, 7.5 mM, 8.0 mM, 8.5, mM, 9.0 mM, 9.5 mM, 10.0 mM, 11 mM, 12 mM, 13 mM, 14 mM, 15 mM, 16 mM, 17 mM, 18 mM, 19 mM and 20 mM. In particular, a composition that contains at least or about at least 10 mM calcium are provided in the methods herein.

[0011] Also provided are pharmaceutical compositions for temporal or conditional cleavage of a component of the ECM for use in treating a fibrotic disease or condition, wherein the pharmaceutical composition contains a modified matrix metalloprotease (MMP) or a catalytically active fragment thereof and a concentration of calcium that is greater than the physiological concentration. In such examples, the modified MMP contains a modification in an unmodified MMP polypeptide or catalytically active fragment thereof that is an amino acid insertion, deletion or replacement; the modified MMP degrades a component of the extracellular matrix to thereby effect treatment of the disease or condition; and the modification confers to the modified MMP or catalytically active fragment thereof reduced activity in the presence of physiological levels of extracellular calcium compared to its activity in the presence of a calcium concentration that is greater than the physiological level, whereby the activity of the modified MMP decreases upon exposure to physiological conditions.

[0012] Also provided are uses of a pharmaceutical composition for formulation of a medicament for temporal or conditional cleavage of a component of the ECM for treatment of a fibrotic disease or condition, where the composition contains a modified matrix metalloprotease (MMP) or a catalytically active fragment thereof and a concentration of calcium that is greater than the physiological concentration. In such examples, the modified MMP contains a modification in an unmodified MMP polypeptide or catalytically active fragment thereof that is an amino acid insertion, deletion or replacement; the modified MMP degrades a component of the extracellular matrix to thereby effect treatment of the disease or condition; and the modification confers to the modified MMP or catalytically active fragment thereof reduced activity in the presence of physiological levels of extracellular calcium compared to its activity in the presence of a calcium concentration that is greater than the physiological level, whereby the activity of the modified MMP decreases upon exposure to physiological conditions.

[0013] In any of the pharmaceutical compositions or uses herein, the modified MMP or catalytically active fragment contained in the provided pharmaceutical compositions for use in treating a fibrotic disease or condition, or used to formulate a medicament for treatment of a fibrotic disease or condition, exhibits reduced activity in the presence of physiological levels of extracellular calcium compared to its activity in the presence of a calcium concentration that is greater than the physiological level. Such physiological levels of calcium include calcium concentrations of about 1 mM to 1.3 mM calcium. Thus, exemplary calcium concentrations that are greater than physiological levels include, but are not limited to, 1.5 mM to 100 mM, 2 mM to 50 mM, 2 mM to 25 mM, 5 mM to 50 mM, 5 mM to 25 mM, 5 mM to 15 mM, and 8 mM to 12 mM calcium. Hence, the pharmaceutical compositions containing calcium concentrations that are greater than physiological levels include calcium concentrations that are at least or about at least or 1.5 mM, including at least or about at least 2.0 mM, 2.5 mM, 3.0 mM, 3.5 mM, 4.0 mM, 4.5 mM, 5.0 mM, 5.5 mM, 6.0 mM, 6.5 mM, 7.0 mM, 7.5 mM, 8.0 mM, 8.5, mM, 9.0 mM, 9.5 mM, 10.0 mM, 11 mM, 12 mM, 13 mM, 14 mM, 15 mM, 16 mM, 17 mM, 18 mM, 19 mM and 20 mM. Thus, the provided pharmaceutical compositions, or uses of a pharmaceutical composition to form a medicament, containing calcium in a concentration that is greater than physiological levels of extracellular calcium include, but are not limited to, those containing 1.5 mM to 100 mM, 2 mM to 50 mM, 2 mM to 25 mM, 5 mM to 50 mM, 5 mM to 25 mM, 5 mM to 15 mM, or 8 mM to 12 mM calcium. Also, the provided pharmaceutical compositions or uses contain calcium in a concentration that is greater than physiological levels of extracellular calcium that is at least or about at least or 1.5 mM, including at least or about at least 2.0 mM, 2.5 mM, 3.0 mM, 3.5 mM, 4.0 mM, 4.5 mM, 5.0 mM, 5.5 mM, 6.0 mM, 6.5 mM, 7.0 mM, 7.5 mM, 8.0 mM, 8.5, mM, 9.0 mM, 9.5 mM, 10.0 mM, 11 mM, 12 mM, 13 mM, 14 mM, 15 mM, 16 mM, 17 mM, 18 mM, 19 mM and 20 mM. In particular, a pharmaceutical composition, or use of a pharmaceutical composition to form a medicament, as provided herein, can contain at least or about at least 10 mM calcium.

[0014] In any of the methods, pharmaceutical compositions or uses herein, the modified MMP or catalytically active fragment administered in the provided methods can exhibit at least 5%, such as at least 10%, 15%, 20%, 25%, 30%, 40%, 50%, 60%, 70%, 80%, 90%, 95%, 100%, 110%, 120%, 130%, 140%, 150%, 160%, 170%, 180%, 190%, 200%, 250%, 300%, 350%, 400%, 450%, 500% or more, of the activity of the unmodified MMP at calcium concentrations greater than physiological levels of calcium. In any of the methods provided, the modified MMP or catalytically active fragment thereof can exhibit reduced activity at physiological levels of extracellular calcium compared to the activity of the corresponding unmodified MMP, which does not contain the modification(s). In methods wherein the modified MMP or catalytically active fragment exhibits reduced activity compared to the unmodified MMP at physiological levels of calcium, the modified MMP or catalytically active fragment can exhibit less than 100% of the activity of the corresponding unmodified MMP not containing the modification(s). Included are methods of administering a modified MMP that exhibits less than 95%, 90%, 85%, 80%, 75%, 70%, 65%, 60%, 55%, 50%, 45%, 40%, 35%, 30%, 25%, 20%, 15%, 10%, 5% or less of the activity of the corresponding unmodified MMP not containing the modification(s).

[0015] In any of the methods, pharmaceutical compositions or uses herein, modifications of the MMP or catalytically active fragment thereof can include amino acid replacements. Any of the provided methods include administering a modified MMP or catalytically active fragment that contains a modification at or near an amino acid that is a metal-binding site. Included are methods of treating a fibrotic disease or condition by administering a modified MMP or catalytically active fragment that contains a modification at or near a zinc- or calcium-binding site. The administered modified MMP or catalytically active fragment can contain a modification at an amino acid corresponding to a position selected from among 102, 103, 104, 105, 106, 107, 108, 136, 137, 138, 139, 140, 141, 142, 146, 147, 148, 149, 150, 151, 152, 153, 154, 155, 156, 157, 158, 159, 160, 161, 162, 163, 164, 165, 166, 167, 168, 169, 170, 171, 172, 173, 174, 175, 176, 177, 178, 179, 180, 181, 182, 183, 184, 185, 196, 197, 198, 199, 201, 202, 203, 204, 205, 206, 207, 208, 209, 210, 211, 212, 263, 264, 265, 266, 267, 268, 269, 307, 308, 309, 310, 311, 312, 313, 356, 357, 358, 359, 360, 361, 362, 405, 406, 407, 408, 409, 410 and 411 with reference to amino acid positions set forth in SEQ ID NO:2, wherein corresponding amino acid positions are identified by alignment of the MMP polypeptide with the polypeptide set forth in SEQ ID NO:2.

[0016] In any of the methods, pharmaceutical compositions or uses herein, exemplary modifications of the MMP or catalytically active fragment thereof administered in the provided methods include an amino acid replacement selected from among replacement with: R at a position corresponding to position 102; K at a position corresponding to position 102; V at a position corresponding to position 102; M at a position corresponding to position 102; P at a position corresponding to position 102; N at a position corresponding to position 102; G at a position corresponding to position 102; L at a position corresponding to position 102; D at a position corresponding to position 102; S at a position corresponding to position 102; F at a position corresponding to position 102; A at a position corresponding to position 102; E at a position corresponding to position 102; Q at a position corresponding to position 102; C at a position corresponding to position 102; N at position corresponding to position 103; E at a position corresponding to position 104; T at a position corresponding to position 104; R at a position corresponding to position 104; D at a position corresponding to position 104; Q at a position corresponding to position 104; V at a position corresponding to position 104; Y at a position corresponding to position 104; H at a position corresponding to position 104; L at a position corresponding to position 104; A at a position corresponding to position 104; M at a position corresponding to position 104; A at a position corresponding to position 105; C at a position corresponding to position 105; F at a position corresponding to position 105; G at a position corresponding to position 105; I at a position corresponding to position 105; L at a position corresponding to position 105; M at a position corresponding to position 105; N at a position corresponding to position 105; P at a position corresponding to position 105; R at a position corresponding to position 105; S at a position corresponding to position 105; T at a position corresponding to position 105; V at a position corresponding to position 105; W at a position corresponding to position 105; E at a position corresponding to position 105; M at a position corresponding to position 106; A at a position corresponding to position 106; Y at a position corresponding to position 106; V at a position corresponding to position 106; I at a position corresponding to position 106; L at a position corresponding to position 107; T at a position corresponding to position 107; S at a position corresponding to position 107; R at a position corresponding to position 107; M at a position corresponding to position 107; V at a position corresponding to position 107; D at a position corresponding to position 107; A at a position corresponding to position 107; K at a position corresponding to position 107; G at a position corresponding to position 107; P at a position corresponding to position 108; G at a position corresponding to position 108; E at a position corresponding to position 108; A at a position corresponding to position 108; Y at a position corresponding to position 108; K at a position corresponding to position 108; C at a position corresponding to position 108; S at a position corresponding to position 108; S at a position corresponding to position 108; F at a position corresponding to position 108; I at a position corresponding to position 108; L at a position corresponding to position 108; N at a position corresponding to position 108; D at a position corresponding to position 136; M at a position corresponding to position 136; N at a position corresponding to position 136; A at a position corresponding to position 136; L at a position corresponding to position 136; P at a position corresponding to position 136; T at a position corresponding to position 136; R at a position corresponding to position 136; S at a position corresponding to position 136; H at a position corresponding to position 136; E at a position corresponding to position 136; A at a position corresponding to position 137; R at a position corresponding to position 137; G at a position corresponding to position 137; K at a position corresponding to position 137; H at a position corresponding to position 137; P at a position corresponding to position 137; S at a position corresponding to position 137; L at a position corresponding to position 137; W at a position corresponding to position 137; F at a position corresponding to position 137; T at a position corresponding to position 137; Y at a position corresponding to position 137; E at a position corresponding to position 137; G at a position corresponding to position 138; R at a position corresponding to position 139; V at a position corresponding to position 139; M at a position corresponding to position 139; C at a position corresponding to position 139; P at a position corresponding to position 139; P at a position corresponding to position 139; S at a position corresponding to position 139; L at a position corresponding to position 139; I at a position corresponding to position 139; H at a position corresponding to position 139; A at a position corresponding to position 139; G at a position corresponding to position 139; F at a position corresponding to position 139; N at a position corresponding to position 139; W at a position corresponding to position 139; Y at a position corresponding to position 139; E at a position corresponding to position 139; E at a position corresponding to position 141; I at a position corresponding to position 141; R at a position corresponding to position 141; S at a position corresponding to position 141; L at a position corresponding to position 141; A at a position corresponding to position 141; D at a position corresponding to position 141; W at a position corresponding to position 141; H at a position corresponding to position 141; N at a position corresponding to position 141; L at a position corresponding to position 142; M at a position corresponding to position 142; V at a position corresponding to position 142; T at a position corresponding to position 146; N at a position corresponding to position 146; Q at a position corresponding to position 146; K at a position corresponding to position 146; S at a position corresponding to position 146; D at a position corresponding to position 146; A at a position corresponding to position 146; Y at a position corresponding to position 146; V at a position corresponding to position 146; R at a position corresponding to position 147; F at a position corresponding to position 147; H at a position corresponding to position 147; W at a position corresponding to position 147; T at a position corresponding to position 147; C at a position corresponding to position 147; S at a position corresponding to position 147; V at a position corresponding to position 147; Q at a position corresponding to position 147; M at a position corresponding to position 147; R at a position corresponding to position 148; R at a position corresponding to position 148; I at a position corresponding to position 148; T at a position corresponding to position 148; G at a position corresponding to position 148; G at a position corresponding to position 148; V at a position corresponding to position 148; A at a position corresponding to position 148; A at a position corresponding to position 148; W at a position corresponding to position 148; P at a position corresponding to position 148; S at a position corresponding to position 148; N at a position corresponding to position 148; S at a position corresponding to position 150; E at a position corresponding to position 150; G at a position corresponding to position 150; M at a position corresponding to position 150; M at a position corresponding to position 150; T at a position corresponding to position 150; W at a position corresponding to position 150; A at a position corresponding to position 150; N at a position corresponding to position 150; K at a position corresponding to position 150; L at a position corresponding to position 150; L at a position corresponding to position 150; V at a position corresponding to position 150; D at a position corresponding to position 150; H at a position corresponding to position 150; G at a position corresponding to position 152; C at a position corresponding to position 152; F at a position corresponding to position 152; L at a position corresponding to position 152; L at a position corresponding to position 152; L at a position corresponding to position 152; P at a position corresponding to position 152; R at a position corresponding to position 152; H at a position corresponding to position 152; T at a position corresponding to position 152; Y at a position corresponding to position 152; K at a position corresponding to position 152; D at a position corresponding to position 152; W at a position corresponding to position 152; I at a position corresponding to position 152; A at a position corresponding to position 152; S at a position corresponding to position 152; R at a position corresponding to position 152; G at a position corresponding to position 153; H at a position corresponding to position 153; V at a position corresponding to position 153; T at a position corresponding to position 153; P at a position corresponding to position 153; F at a position corresponding to position 153; D at a position corresponding to position 153; Q at a position corresponding to position 153; Y at a position corresponding to position 153; L at a position corresponding to position 154; C at a position corresponding to position 154; S at a position corresponding to position 154; I at a position corresponding to position 154; M at a position corresponding to position 155; H at a position corresponding to position 156; L at a position corresponding to position 156; E at a position corresponding to position 156; A at a position corresponding to position 156; W at a position corresponding to position 156; C at a position corresponding to position 156; P at a position corresponding to position 156; P at a position corresponding to position 156; V at a position corresponding to position 156; V at a position corresponding to position 156; K at a position corresponding to position 156; S at a position corresponding to position 156; G at a position corresponding to position 156; T at a position corresponding to position 156; Y at a position corresponding to position 156; R at a position corresponding to position 156; M at a position corresponding to position 156; K at a position corresponding to position 157; D at a position corresponding to position 157; F at a position corresponding to position 157; R at a position corresponding to position 157; H at a position corresponding to position 157; L at a position corresponding to position 157; N at a position corresponding to position 157; N at a position corresponding to position 157; Y at a position corresponding to position 157; S at a position corresponding to position 157; T at a position corresponding to position 157; A at a position corresponding to position 157; A at a position corresponding to position 157; Q at a position corresponding to position 157; P at a position corresponding to position 157; P at a position corresponding to position 157; V at a position corresponding to position 157; V at a position corresponding to position 157; M at a position corresponding to position 157; S at a position corresponding to position 158; Y at a position corresponding to position 158; R at a position corresponding to position 158; L at a position corresponding to position 158; V at a position corresponding to position 158; V at a position corresponding to position 158; C at a position corresponding to position 158; A at a position corresponding to position 158; W at a position corresponding to position 158; I at a position corresponding to position 158; F at a position corresponding to position 158; Q at a position corresponding to position 158; T at a position corresponding to position 158; G at a position corresponding to position 158; K at a position corresponding to position 158; N at a position corresponding to position 158; D at a position corresponding to position 158; R at a position corresponding to position 159; S at a position corresponding to position 159; Q at a position corresponding to position 159; P at a position corresponding to position 159; V at a position corresponding to position 159; K at a position corresponding to position 159; A at a position corresponding to position 159; Y at a position corresponding to position 159; E at a position corresponding to position 159; T at a position corresponding to position 159; M at a position corresponding to position 159; I at a position corresponding to position 159; W at a position corresponding to position 159; W at a position corresponding to position 159; L at a position corresponding to position 159; C at a position corresponding to position 159; A at a position corresponding to position 160; H at a position corresponding to position 160; N at a position corresponding to position 160; W at a position corresponding to position 160; R at a position corresponding to position 160; M at a position corresponding to position 160; Q at a position corresponding to position 160; V at a position corresponding to position 160; S at a position corresponding to position 160; E at a position corresponding to position 160; L at a position corresponding to position 160; T at a position corresponding to position 160; S at a position corresponding to position 161; C at a position corresponding to position 161; L at a position corresponding to position 161; R at a position corresponding to position 161; R at a position corresponding to position 161; G at a position corresponding to position G; W at a position corresponding to position 161; Y at a position corresponding to position 161; E at a position corresponding to position 161; P at a position corresponding to position 161; T at a position corresponding to position 161; H at a position corresponding to position 161; I at a position corresponding to position 161; V at a position corresponding to position 161; F at a position corresponding to position 161; Q at a position corresponding to position 161; S at a position corresponding to position 164; W at a position corresponding to position 166; D at a position corresponding to position 167; R at a position corresponding to position 167; A at a position corresponding to position 167; S at a position corresponding to position 167; S at a position corresponding to position 167; F at a position corresponding to position 167; Y at a position corresponding to position 167; P at a position corresponding to position 167; T at a position corresponding to position 167; V at a position corresponding to position 167; L at a position corresponding to position 167; M at a position corresponding to position 167; N at a position corresponding to position 167; G at a position corresponding to position 167; K at a position corresponding to position 167; E at a position corresponding to position 167; R at a position corresponding to position 168; L at a position corresponding to position 170; R at a position corresponding to position 170; R at a position corresponding to position 170; I at a position corresponding to position 170; T at a position corresponding to position 170; Q at a position corresponding to position 170; G at a position corresponding to position 170; S at a position corresponding to position 170; H at a position corresponding to position 170; M at a position corresponding to position 170; K at a position corresponding to position 170; S at a position corresponding to position 171; M at a position corresponding to position 171; N at a position corresponding to position 171; P at a position corresponding to position 171; R at a position corresponding to position 171; Y at a position corresponding to position 171; A at a position corresponding to position 171; Q at a position corresponding to position 171; H at a position corresponding to position 171; L at a position corresponding to position 171; W at a position corresponding to position 171; C at a position corresponding to position 171; K at a position corresponding to position 171; E at a position corresponding to position 171; D at a position corresponding to position 171; Y at a position corresponding to position 172; T at a position corresponding to position 172; P at a position corresponding to position 172; A at a position corresponding to position 172; L at a position corresponding to position 172; Q at a position corresponding to position 172; E at a position corresponding to position 172; M at a position corresponding to position 172; D at a position corresponding to position 172; V at a position corresponding to position 172; R at a position corresponding to position 172; W at a position corresponding to position 172; N at a position corresponding to position 172; C at a position corresponding to position 173; L at a position corresponding to position 173; K at a position corresponding to position 173; W at a position corresponding to position 173; W at a position corresponding to position 173; S at a position corresponding to position 173; A at a position corresponding to position 173; R at a position corresponding to position 173; N at a position corresponding to position 173; T at a position corresponding to position 173; D at a position corresponding to position 173; V at a position corresponding to position 173; F at a position corresponding to position 173; M at a position corresponding to position 173; Y at a position corresponding to position 173; P at a position corresponding to position 173; I at a position corresponding to position 175; T at a position corresponding to position 175; N at a position corresponding to position 175; V at a position corresponding to position 175; S at a position corresponding to position 175; R at a position corresponding to position 175; G at a position corresponding to position 175; A at a position corresponding to position 175; F at a position corresponding to position 175; C at a position corresponding to position 175; Q at a position corresponding to position 175; Y at a position corresponding to position 175; L at a position corresponding to position 175; H at a position corresponding to position 175; P at a position corresponding to position 175; E at a position corresponding to position 175; F at a position corresponding to position 176; Q at a position corresponding to position 176; V at a position corresponding to position 176; T at a position corresponding to position 176; C at a position corresponding to position 176; L at a position corresponding to position 176; P at a position corresponding to position 179; L at a position corresponding to position 179; E at a position corresponding to position 179; G at a position corresponding to position 179; G at a position corresponding to position 179; S at a position corresponding to position 179; A at a position corresponding to position 179; K at a position corresponding to position 179; T at a position corresponding to position 179; I at a position corresponding to position 179; R at a position corresponding to position 179; N at a position corresponding to position 179; W at a position corresponding to position 179; Q at a position corresponding to position 179; V at a position corresponding to position 179; C at a position corresponding to position 179; M at a position corresponding to position 180; P at a position corresponding to position 180; K at a position corresponding to position 180; Y at a position corresponding to position 180; Q at a position corresponding to position 180; R at a position corresponding to position 180; A at a position corresponding to position 180; T at a position corresponding to position 180; I at a position corresponding to position 180; F at a position corresponding to position 180; C at a position corresponding to position 180; G at a position corresponding to position 180; S at a position corresponding to position 180; N at a position corresponding to position 180; D at a position corresponding to position 180; S at a position corresponding to position 181; Q at a position corresponding to position 181; A at a position corresponding to position 181; T at a position corresponding to position 181; E at a position corresponding to position 181; C at a position corresponding to position 182; P at a position corresponding to position 182; P at a position corresponding to position 182; S at a position corresponding to position 182; T at a position corresponding to position 182; R at a position corresponding to position 182; D at a position corresponding to position 182; A at a position corresponding to position 182; F at a position corresponding to position 182; L at a position corresponding to position 182; I at a position corresponding to position 182; Y at a position corresponding to position 182; Q at a position corresponding to position 182; W at a position corresponding to position 182; M at a position corresponding to position 182; G at a position corresponding to position 182; K at a position corresponding to position 183; W at a position corresponding to position 183; W at a position corresponding to position 183; E at a position corresponding to position 183; A at a position corresponding to position 183; T at a position corresponding to position 183; N at a position corresponding to position 183; H at a position corresponding to position 183; V at a position corresponding to position 183; C at a position corresponding to position 183; M at a position corresponding to position 183; G at a position corresponding to position 183; S at a position corresponding to position 183; S at a position corresponding to position 185; C at a position corresponding to position 197; V at a position corresponding to position 201; M at a position corresponding to position 201; E at a position corresponding to position 203; A at a position corresponding to position 204; M at a position corresponding to position 205; I at a position corresponding to position 205; A at a position corresponding to position 207; M at a position corresponding to position 207; D at a position corresponding to position 208; V at a position corresponding to position 208; P at a position corresponding to position 208; G at a position corresponding to position 208; A at a position corresponding to position 208; K at a position corresponding to position 208; N at a position corresponding to position 208; F at a position corresponding to position 208; Q at a position corresponding to position 208; W at a position corresponding to position 208; T at a position corresponding to position 208; E at a position corresponding to position 208; C at a position corresponding to position 208; R at a position corresponding to position 208; L at a position corresponding to position 208; T at a position corresponding to position 210; P at a position corresponding to position 211; R at a position corresponding to position 211; K at a position corresponding to position 211; G at a position corresponding to position 211; M at a position corresponding to position 211; M at a position corresponding to position 211; N at a position corresponding to position 211; N at a position corresponding to position 211; V at a position corresponding to position 211; Q at a position corresponding to position 211; S at a position corresponding to position 211; A at a position corresponding to position 211; E at a position corresponding to position 212; T at a position corresponding to position 212; N at a position corresponding to position 212; S at a position corresponding to position 212; P at a position corresponding to position 212; Q at a position corresponding to position 212; F at a position corresponding to position 212; H at a position corresponding to position 212; and Y at a position corresponding to position 212, with reference to amino acid positions set forth in SEQ ID NO:2, wherein corresponding amino acid positions are identified by alignment of the MMP polypeptide with the polypeptide set forth in SEQ ID NO:2.

[0017] In any of the methods, pharmaceutical compositions or uses provided herein, the modified MMP or catalytically active fragment thereof is modified at an amino acid that is a calcium binding site. For example, in any of the methods herein, the method includes administering a modified MMP, whereby (i) the modified MMP contains an amino acid replacement in an unmodified MMP polypeptide or catalytically active fragment thereof at an amino acid residue that is a calcium-binding site; (ii) administration of the composition effects degradation of a component of the extracellular matrix to effect treatment of the disease or condition; (iii) the amino acid replacement confers to the modified MMP or catalytically active fragment thereof reduced activity in the presence of physiological levels of extracellular calcium compared to its activity in the presence of a calcium concentration that is greater than the physiological level, whereby its activity decreases upon exposure to physiological conditions such that the modified MMP is conditionally active after administration so that the component of the extracellular matrix is degraded for a limited time.

[0018] In any of the methods, pharmaceutical compositions or uses herein, the modified MMP or catalytically active fragment can contain a modification at a calcium-binding site that is at a position corresponding to the amino acid at position 105, 139, 156, 157, 159, 161, 171, 173, 175, 179, 180, 182, 266, 310, 359 or 408, with reference to the amino acid positions set forth in SEQ ID NO:2, wherein corresponding amino acid positions are identified by alignment of the MMP polypeptide with the polypeptide set forth in SEQ ID NO:2. Such modifications, with reference to MMP-1, include, but are not limited to, D105, D139, D156, G157, G159, N161, G171, G173, D175, D179, E180, E182, D266, E310, D359, and D408. In any example of the provided methods, the modification(s) can include an amino acid replacement at a position corresponding to the amino acid at position 105, 156, 179, 180, or 182, with reference to the amino acid positions set forth in SEQ ID NO:2.

[0019] Among the modified MMPs or catalytically active fragments thereof used in any of the provided methods, pharmaceutical compositions or uses herein, are modified MMPs in which the unmodified MMP contains an acidic amino acid at the modified amino acid position and the acidic amino acid is replaced by an amino acid residue that is a non-acidic amino acid residue. The acidic amino acid can be, for example, aspartic acid (D) or glutamic acid (E). The modified MMPs or catalytically active fragments include replacement of the acidic amino acid by: a neutral amino acid that is cysteine (C), asparagine (N), glutamine (Q), threonine (T), tyrosine (Y), serine (S) or glycine (G); a hydrophobic amino acid that is phenylalanine (F), methionine (M), tryptophan (W), isoleucine (I), valine (V), leucine (L), alanine (A) and proline (P); or a basic amino acid that is histidine (H), lysine (K) or arginine (R). Thus, exemplary amino acid replacements of the modified MMP active fragment, used in the provided method, include a replacement of A at a position corresponding to position 105; I at a position corresponding to position 105; N at a position corresponding to position 105; L at a position corresponding to position 105; G at a position corresponding to position 105; R at a position corresponding to position 156; H at a position corresponding to position 156; K at a position corresponding to position 156; T at a position corresponding to position 156; N at a position corresponding to position 179; T at a position corresponding to position 180; F at a position corresponding to position 180; and T at a position corresponding to position 182, with reference to the amino acid positions set forth in SEQ ID NO:2.

[0020] For example, in any of the methods, pharmaceutical compositions or uses herein, among these are modified MMPs or catalytic fragments that contain an amino acid replacement that is a replacement with T at a position corresponding to position 156, a replacement with N at a position corresponding to position 179, or a replacement with T at a position corresponding to position 156 and a replacement with N at a position corresponding to position 179.

[0021] In examples of any of the methods, pharmaceutical compositions or uses herein, also among these are modified MMPs or catalytic fragments that contain an amino acid replacement at an amino acid position corresponding to position 159 with reference to amino acid positions set forth in SEQ ID NO:2, wherein the amino acid replacement is replacement by a hydrophobic amino acid residue and corresponding amino acid positions are identified by alignment of the MMP polypeptide with the polypeptide set forth in SEQ ID NO:2. Such amino replacements include replacement by a hydrophobic amino acid such as phenylalanine (F), methionine (M), tryptophan (W), isoleucine (I), valine (V), leucine (L), alanine (A) or proline (P); or replacement by a neutral amino acid such as cysteine (C), asparagine (N), glutamine (Q), threonine (T), tyrosine (Y), serine (S) or glycine (G). An example of such a modification includes an amino acid replacement of V at a position corresponding to position 159, with reference to SEQ ID NO:2. The modified MMP polypeptide or catalytic fragment having a replacement of the amino acid of V at a position corresponding to position 159 also can contain an amino acid replacement of K at the amino acid position corresponding to position 208.

[0022] In any of the methods, pharmaceutical compositions or uses herein, also among the modified MMPs or catalytically active fragments thereof used in the provided methods that contain a replacement of an acidic amino acid at the modified amino acid position, is a modified MMP or catalytically active fragment thereof that contains an amino acid modification that is a replacement of the amino acid at a position corresponding to position 227 with glutamic acid (E), with reference to the amino acid positions set forth in SEQ ID NO:2. Included among these modified MMPs are those which contain a hydrophobic amino acid at the replaced position, such as valine (V). Thus, the replacement V227E, with reference to amino acid positions set forth in SEQ ID NO:2, is included among the modified MMPs and catalytic fragments which can be used in the methods provided herein.

[0023] In particular examples of any of the methods, pharmaceutical compositions or uses herein, the modified MMP polypeptide or fragment used in the provided methods can additionally include an amino acid replacement that is any replacement corresponding to the replacements set forth in Table 7, with reference to the amino acid position numbering set forth in SEQ ID NO:2.

[0024] In any of the provided methods, pharmaceutical compositions or uses herein, the methods can employ a modified MMP or catalytically active fragment with contains the sequence of amino acids set forth in any of SEQ ID NOS:162-167, or a sequence of amino acids that exhibits at least 70% sequence identity to any of SEQ ID NOS:162-167 and contains the amino acid replacement(s). Such a modified MMP or catalytically active fragment can be a sequence of amino acids that is at least 75%, 80%, 85%, 86%, 87%, 88%, 89%, 90%, 91%, 92%, 93%, 94%, 95%, 96%, 97%, 98%, 99% or more, sequence identity to any of SEQ ID NOS:162-167.

[0025] In any of the methods, pharmaceutical compositions or uses herein, the modified MMP or catalytically active fragment used in the methods provided herein exhibits reduced activity, such as less than 90%, 85%, 80%, 75%, 70%, 65%, 60%, 55%, 50%, 45%, 40%, 35%, 30%, 25%, 20%, 15%, 10%, 5%, 2% or less, matrix metalloprotease activity in the presence of physiological levels of extracellular calcium as compared to its activity in the presence of a calcium concentration that is greater than the physiological level. The modified MMP or catalytically active fragment can exhibit greater than 0.5-fold, 1-fold, 1.5-fold, 2-fold, 2.5-fold, 3-fold, 4-fold, 5-fold, 6-fold, 7-fold, 8-fold, 9-fold, 10-fold, 11-fold, 12-fold, 13-fold, 14-fold, 15-fold or 20-fold decreased matrix metalloprotease activity in the presence of physiological levels of extracellular calcium compared to its activity in the presence of a calcium concentration that is greater than the physiological level. In particular, the modified MMP or catalytically active fragment, used in the provided methods, exhibits at least 2-fold decreased matrix metalloprotease activity in the presence of physiological levels of extracellular calcium compared to its activity in the presence of a calcium concentration that is greater than the physiological level.

[0026] In any of the provided methods, pharmaceutical compositions or uses herein, the MMP effects temporal or conditional cleavage of a component of the ECM (e.g., collagen) for treatment of a fibrotic disease or condition by degrading a component of the extracellular matrix. The fibrotic disease or condition can be a collagen-mediated disease or condition, where the modified MMP or catalytically active fragment exhibits collagen cleavage activity to cleave the collagen component of the extracellular matrix. Such a component of the extracellular matrix can be selected from among collagen type I, collagen type II, collagen type III, collagen type IV, collagen type VI, collagen type VII, collagen type VIII, collagen type IX, collagen type X, collagen type XI and collagen type XIV. In particular, collagen type I, collagen type III, or collagen type I and collagen type III can be degraded in the provided methods to effect treatment of a collagen-mediated disease or condition.

[0027] In any of the methods, pharmaceutical compositions or uses herein, the modified MMP or catalytically active fragment that confers collagen cleavage activity can be a modified MMP that contains a modification in an unmodified MMP polypeptide or catalytically active fragment thereof selected from metalloprotease-1 (MMP-1), matrix metalloprotease-2 (MMP-2), matrix metalloprotease-3 (MMP-3), matrix-metalloprotease-7 (MMP-7), matrix metalloprotease-8 (MMP-8), matrix metalloprotease-9 (MMP-9), matrix metalloprotease-10 (MMP-10), matrix metalloprotease-11 (MMP-11), matrix-metalloprotease-12 (MMP-12), matrix metalloprotease 13 (MMP-13), matrix metalloprotease-14 (MMP-14), matrix metalloprotease-16 (MMP-16), matrix metalloprotease-18 (MMP-18), matrix metalloprotease-19, matrix metalloprotease-25 (MMP-25), and matrix metalloprotease-26 (MMP-26), or a catalytically active fragment thereof. Wherein the component of the extracellular matrix to be degraded is collagen type I, the unmodified MMP or catalytically active fragment can be selected from among, for example, a MMP-1, MMP-2, MMP-7, MMP-8, MMP-12, MMP-13, MMP-14 and MMP-18, or catalytically active fragment thereof. Wherein the component of the extracellular matrix to be degraded is collagen type III, the unmodified MMP or catalytically active fragment can be selected from among, for example, a MMP-1, MMP-2, MMP-3, MMP-8, MMP-10, MMP-13, MMP-14 and MMP-16, or catalytically active fragment thereof. Wherein collagen type I and collagen type III are the components of the extracellular matrix to be degraded, the unmodified MMP or catalytically active fragment can be selected from among, for example, a MMP-1, MMP-2, MMP-8, MMP-13 and MMP-14, or catalytically active fragment thereof.

[0028] In any of the methods, pharmaceutical compositions or uses herein, the modified MMP or catalytically active fragment can be a modified MMP that contains a modification in an unmodified MMP polypeptide that contains the sequence of amino acids set forth in any of SEQ ID NOS:5, 132, 133, 134, 135, 137, 138, 140, 143 or 145 or a catalytically active fragment thereof, or a sequence of amino acids that exhibits at least 85% sequence identity to any of SEQ ID NOS:5, 132, 133, 134, 135, 137, 138, 140, 143 or 145 or a catalytically active fragment thereof. This includes an unmodified MMP or catalytically active fragment which contains a sequence of amino acids that exhibits at least 86%, 87%, 88%, 89%, 90%, 91%, 92%, 93%, 94%, 95%, 96%, 97%, 98%, 99% or more sequence identity to any of SEQ ID NOS:5, 132, 133, 134, 135, 137, 138, 140, 143 or 145 or a catalytically active fragment thereof.

[0029] In particular, in any of the methods, pharmaceutical compositions or uses herein, the unmodified MMP polypeptide or catalytically active fragment is a MMP-1 polypeptide that contains the sequence of amino acids set forth in SEQ ID NO:5, or is a catalytically active fragment thereof, or a sequence of amino acids that exhibits at least 85% sequence identity to SEQ ID NO:5 or a catalytically active fragment thereof. This includes an unmodified polypeptide that contains a sequence of amino acids that exhibits at least 86%, 87%, 88%, 89%, 90%, 91%, 92%, 93%, 94%, 95%, 96%, 97%, 98%, 99% or more, sequence identity to SEQ ID NO:5 or a catalytically active fragment thereof. In any of the methods, pharmaceutical compositions or uses herein, the catalytically active fragment can be a fragment that contains the catalytic domain or a catalytically active portion of the catalytic domain.

[0030] In any of the methods, pharmaceutical compositions or uses herein, the modified MMP or catalytically active fragment can exhibit at least 85% sequence identity to the unmodified MMP, and hence, can contain up to 1, 2, 3, 4, 5, 6, 7, 8, 9, 10, 11, 12, 13, 14, 15, 16, 17, 18, 19, 20 or more modifications compared to the unmodified MMP. An example of such a modified polypeptide is a modified MMP or catalytically active fragment that contains only one amino acid replacement to confer reduced activity in the presence of physiological levels of extracellular calcium compared to its activity in the presence of a calcium concentration that is greater than the physiological level.

[0031] In any of the above methods, pharmaceutical compositions or uses herein, the modified MMP or catalytically active fragment can be a mature enzyme or a catalytically active fragment that contains only the catalytically active domain or a catalytically active portion of the catalytic domain. The modified MMP or catalytically active fragment can lack all or a portion of a proline-rich linker and/or a hemopexin domain. The modified MMP or catalytically active fragment also can be a zymogen that is processed to a mature enzyme immediately before administration. The zymogen can be processed, for example, by a processing agent. Exemplary processing agents include plasmin, plasma kallikrein, trypsin-1, trypsin-2, neutrophil elastase, cathepsin G, tryptase, chymase, proteinase-3, furin, urinary plasminogen activator (u-PA), an active MMP, 4-aminophenylmercuric acetate (APMA), HgCl₂, N-ethylmaleimide, sodium dodecyl sulfate (SDS), a chaotropic agent, oxidized glutathione, reactive oxygen, Au(I) slat, acidic pH and heat. The processing agent can optionally be purified away from the modified MMP prior to administration.

[0032] In any of the methods, pharmaceutical compositions or uses herein, the modified MMP or catalytically active fragment administered in any of the provided methods also can exhibit temperature sensitivity. For example, the modified MMP or catalytically active fragment can exhibit a ratio of at least 1.2 of metalloprotease activity at 25° C. as compared to at 37° C. This includes a modified MMP or catalytically active fragment that exhibits a ratio of metalloprotease activity at 25° C. as compared to at 37° C. of at least 1.3, 1.4, 1.5, 1.6, 1.7, 1.8, 1.9, 2.0, 3.5, 4.0, 5.0, 6.0, 7.0, 8.0. 9.0, 10.0, 11.0, 12.0, 13.0, 14.0, 15.0, 20.0, 30.0, 40.0 or more.

[0033] In any of the methods herein, the composition(s) used in the provided methods can be administered to the extracellular matrix (ECM) of the subject. The modified MMP or catalytically active fragment can be administered at physiological temperature or below physiological temperature, for example, at or below 25° C. Thus, the composition containing the modified MMP that is to be administered in the provided methods can have a temperature that is at or below 25° C. The modified MMP or catalytically active fragment can optionally be mixed with a composition that has a temperature lower than the physiological temperature of the body immediately before administration. The ECM of the subject (i.e., locus of administration) also optionally can be cooled to below the physiological temperature of the body, and can be maintained below the physiological temperature of the body for a predetermined time.

[0034] In examples of any of the methods herein, the activity of the modified MMP or catalytically active fragment can be reduced in the provided methods by administering a calcium-chelating agent. Such calcium-chelating agents include, but are not limited to, ethylenediaminetetraacetic acid (EDTA), ethylene glycol tetraacetic acid (EGTA), 1,2-bis(o-aminophenoxy)ethane-N,N,N′,N′-tetraacetic acid (BAPTA) or derivatives thereof. The calcium-chelating agent can be administered at a concentration of 1 μM to 100 mM, 5 μM to 50 mM or 10 μM to 20 mM prior to, intermittently with, subsequently to, or simultaneously with administration of the composition containing the modified MMP or catalytically active fragment.

[0035] In any of the provided methods herein, the methods can effect treatment of a fibrotic disease or condition by administering the modified MMP or catalytically active fragment at a therapeutically effective amount that can be selected from among a range of from or from about 10 μg to 100 mg, 50 μg to 75 mg, 100 μg to 50 mg, 250 μg to 25 mg, 500 μg to 10 mg, 1 mg to 5 mg and 2 mg to 4 mg. The therapeutically effective amount of the modified MMP or catalytically active fragment can be administered by any method, including subcutaneous, intramuscular, intralesional, intradermal, topical, transdermal, intravenous, oral, and rectal administration. In particular, the provided methods permit subcutaneous administration. Hence, in any of the examples of pharmaceutical compositions or uses herein, the composition can be formulated to contain an amount of MMP that is selected from among a range of from or from about 10 μg to 100 mg, 50 μg to 75 mg, 100 μg to 50 mg, 250 μg to 25 mg, 500 μg to 10 mg, 1 mg to 5 mg and 2 mg to 4 mg.

[0036] In particular, in any of the methods, pharmaceutical compositions or uses herein, the fibrotic disease or condition is a collagen-mediated disease or condition. Such a collagen-mediated disease or condition can be associated with irregular formation of collagen fibers and the fibrotic disease or condition can be treated by methods of administering a modified MMP to sever the fibers. These irregularly-formed collagen fibers can be fibrous septae, fibrous scars or fibrous plaques which can be formed by type I collagen and/or type III collagen; and degrading the collagen type I and/or collagen type III, as set forth in the provided methods, effects severance of the fibers. Examples of such collagen-mediated diseases or conditions, including those that are associated with irregular formation of collagen fibers include, for example, cellulite; Dupuytren's disease; Peyronie's disease; Ledderhose fibrosis; stiff joints, such as frozen shoulder; existing scars, such as surgical adhesions, keloids, hypertrophic scars and depressed scars; scleroderma, lymphedema, and collagenous colitis. A fibrotic disease or condition also can include herniated protruding discs.

### BRIEF DESCRIPTION OF THE FIGURES

[0037] FIG. 1 sets forth the amino acid sequence of MMP-1 and indicates the residues of identified regions and domains, such as the propeptide, the catalytic domain, linker region, Hemopexin-like domains 1-4, and the cysteine switch. The sites of zinc ion binding are indicated by open triangles and Z1 (catalytic zinc) and Z2 (structural zinc). The calcium-binding residues are indicated by closed triangles and C1, C2, C3, or C4. The active site glutamate is indicated by an open circle.

[0038] FIGS. 2A-2C depict exemplary alignments of the human MMP-1 zymogen amino acid sequence with the amino acid sequences of the zymogen forms of other human MMP polypeptides. The alignments are of Pro-MMP-1 (SEQ ID NO:2) and Pro-MMP-8 (SEQ ID NO:17; FIG. 2A); Pro-MMP-13 (SEQ ID NO:20; FIG. 2B); and Pro-MMP-18 (SEQ ID NO:23; FIG. 2C). The catalytic domains are underlined, and calcium- and zinc-binding residues within the catalytic domain are indicated by triangles. Closed triangles indicate calcium-binding residues, open triangles indicate zinc-binding residues, and the active site glutamate is indicated by an open circle. Exemplary corresponding residues are highlighted. The extent of conservation between the aligned sequences is indicated below the alignment as follows: a: “*” indicates the residues are identical, a “:” indicates a conserved substitution with respect to the MMP-1 sequence, and a “.” indicates a semi-conservative substitution with respect to the MMP-1 sequence.

[0039] FIGS. 3A-3C depict exemplary alignments of the human MMP-1 zymogen amino acid sequence with species variants of MMP-1 zymogen polypeptides. The alignments are of human Pro-MMP-1 (SEQ ID NO:2) and bovine Pro-MMP-1 (SEQ ID NO:11; FIG. 3A); pig Pro-MMP-1 (SEQ ID NO:9; FIG. 3B); and mouse Pro-MMP-1a (SEQ ID NO:14; FIG. 3C). The catalytic domains are underlined, and calcium- and zinc-binding residues within the catalytic domain are indicated by triangles. Closed triangles indicate calcium-binding residues, open triangles indicate zinc-binding residues, and the active site glutamate is indicated by an open circle. Exemplary corresponding residues are highlighted. The extent of conservation between the aligned sequences is indicated below the alignment as follows: a “*” indicates the residues are identical, a “:” indicates a conserved substitution with respect to the MMP-1 sequence, and a “.” indicates a semi-conservative substitution with respect to the MMP-1 sequence.

[0040] FIG. 4 depicts exemplary alignments of the human MMP-1 zymogen amino acid sequence with the mature active form of MMP-1 lacking the prodomain. The alignments are of human Pro-MMP-1 (SEQ ID NO:2) and mature MMP-1 (SEQ ID NO:5). The catalytic domains are underlined, and calcium- and zinc-binding residues within the catalytic domain are indicated by triangles. Closed triangles indicate calcium-binding residues, open triangles indicate zinc-binding residues, and the active site glutamate is indicated by an open circle. Exemplary corresponding residues are highlighted. The extent of conservation between the aligned sequences is indicated below the alignment as follows: a “*” indicates the residues are identical, a “:” indicates a conserved substitution with respect to the MMP-1 sequence, and a “.” indicates a semi-conservative substitution with respect to the MMP-1 sequence.

### DETAILED DESCRIPTION

### Outline

[0041] A. Definitions

[0042] B. Matrix Metalloproteinases and Calcium-Dependent Conditional Activity
[0043] 1. Matrix metalloprotease activity in the extracellular matrix
[0044] 2. Regulation of MMP activity
   [0045] a. Metal binding
   [0046] b. Endogenous inhibitors
[0047] 3. Role of collagen in ECM diseases and conditions
[0048] 4. Conditional regulation of MMP activity by calcium-dependence

[0049] C. Matrix Metalloproteinases (MMPs): MMP-1 and Other MMP Collagenases
[0050] 1. Matrix metalloproteinase-1 (MMP-1)
   [0051] a. Catalytic domain
      [0052] i. Zn²⁺ ions
      [0053] ii. Ca²⁺ ions
   [0054] b. Linker region and hemopexin-like domain
   [0055] c. MMP-1 substrates
[0056] 2. Other collagenases

[0057] D. Calcium-Sensitive Modified Matrix Metalloprotease Polypeptides (csMMP)
[0058] 1. Modifications at or near a metal binding site
   [0059] Amino acids involved in calcium coordination
[0060] 2. Modification of a residue corresponding to position 227
[0061] 3. Combination mutants
[0062] 4. Additional modifications

[0063] E. Methods of Producing Nucleic Acids Encoding csMMPs and Polypeptides Thereof
[0064] 1. Vectors and cells
[0065] 2. Expression
   [0066] a. Prokaryotic cells
   [0067] b. Yeast cells
   [0068] c. Insect cells
   [0069] d. Mammalian cells
   [0070] e. Plants
[0071] 3. Purification techniques
[0072] 4. Methods of activation

[0073] F. Pharmaceutical Compositions, Dosages and Formulations
[0074] 1. Compositions for conditional activity
[0075] 2. Formulations
   [0076] a. Injectables, solutions and emulsions
      [0077] Lyophilized powders
   [0078] b. Topical administration
   [0079] c. Compositions for other routes of administration
[0080] 3. Dosages and administration

[0081] G. Methods of Assessing csMMP Activity
[0082] 1. Methods of assessing enzymatic activity
[0083] 2. Methods of assessing degradation of ECM component
   [0084] a. In vitro assays
   [0085] b. In vivo assays
   [0086] c. Non-human animal models

[0087] H. Methods of Conditional Activation for Treating Diseases or Defects of the ECM
[0088] 1. Selecting modified MMP
[0089] 2. Methods of conditional activation
   [0090] a. Calcium
   [0091] b. Temperature
[0092] 3 Exemplary fibrotic diseases and conditions (e.g., collagen-mediated diseases and conditions)
   [0093] a. Cellulite
   [0094] b. Dupuytren's disease
   [0095] c. Peyronie's disease
   [0096] d. Ledderhose fibrosis
   [0097] e. Stiff joints
   [0098] f. Existing Scars
      [0099] i. Surgical adhesions
      [0100] ii. Keloids
      [0101] iii. Hypertrophic scars
   [0102] g. Scleroderma
   [0103] h. Lymphedema
   [0104] i. Collagenous colitis
[0105] 2. Spinal pathologies

[0106] I. Combination Therapies
[0107] 1. Anesthesia and vasoconstrictors
[0108] 2. Dispersion agent
   [0109] Hyaluronidases
[0110] J. Examples

### A. DEFINITIONS

[0111] Unless defined otherwise, all technical and scientific terms used herein have the same meaning as is commonly understood by one of skill in the art to which the invention(s) belong. All patents, patent applications, published applications and publications, GenBank sequences, databases, websites and other published materials referred to throughout the entire disclosure herein, unless noted otherwise, are incorporated by reference in their entirety. In the event that there is a plurality of definitions for terms herein, those in this section prevail. Where reference is made to a URL or other such identifier or address, it understood that such identifiers can change and particular information on the internet can come and go, but equivalent information can be found by searching the internet. Reference thereto evidences the availability and public dissemination of such information.

[0112] As used herein, the extracellular matrix (ECM) refers to the extracellular space within tissues that is formed as a complex meshwork structure that surrounds and provides structural support to cells of specialized tissues and organs. The ECM is made up of structural proteins such as collagen and elastin, specialized proteins such as fibronectin, and proteoglycans. The exact biochemical composition varies from tissue to tissue. In the skin, for example, it is the dermal layer that contains the ECM. Reference to the “interstitium,” or “interstitial space” is used interchangeably herein to refer to the ECM.

[0113] As used herein, a component of the ECM refers to any material produced by cells of connective tissue and secreted into the interstitium. For purposes herein, reference to ECM components refers to proteins and glycoproteins, and not to other cellular components or other components of the ECM. Exemplary ECM components include, but are not limited to, matrix proteins such as collagen, fibronectin, elastin and proteoglycans.

[0114] As used herein, a matrix degrading enzyme refers to any enzyme that degrades one or more components of the ECM. Matrix-degrading enzymes include proteases, which are enzymes that catalyze the hydrolysis of covalent peptide bonds. Matrix-degrading enzymes include any known to one of skill in the art. Exemplary matrix-degrading enzymes include matrix metalloproteases, allelic or species variants, or other variants thereof.

[0115] As used herein, a matrix metalloprotease (MMP) refers to a type of matrix-degrading enzyme that is a zinc- and calcium-dependent endopeptidase that contains an active site Zn²⁺ required for activity. MMPs include enzymes that degrade components of the ECM, including, but not limited to, collagen, fibronectin, elastin and proteoglycans. MMPs generally contain a propeptide, a catalytic domain, a proline linker and a hemopexin (also called hemopexin-like C-terminal) domain. Some MMPs contain additional domains. Exemplary MMPs are set forth in Table 3. Reference to a MMP includes all forms, for example, the precursor form (containing the signal sequence), the proenzyme form (containing the propeptide, but no signal sequence), the processed active form (lacking the signal and propeptide), and forms thereof lacking one or more domains. For example, reference to a MMP refers to MMPs containing only the catalytically active domain. Domains of an exemplary MMP (MMP-1) are identified in FIG. 1. MMPs also include allelic or species variants, or other variants thereof.

[0116] As used herein, a modified matrix-degrading enzyme or a modified MMP (also interchangeably referred to as a variant or mutant) refers to an enzyme that has one or more modifications in the primary amino acid sequence as compared to a wild-type enzyme. The one or more mutations can be one or more amino acids replacements (substitutions), insertions, deletions, and any combination thereof. A modified enzyme includes those with 1, 2, 3, 4, 5, 6, 7, 8, 9, 10, 11, 12, 13, 14, 15, 16, 17, 18, 19, 20 or more modified positions. The modifications can provide altered properties of the enzyme. Exemplary of modifications include those described herein that confer increased calcium-dependence for activity of the enzyme, i.e., are calcium-sensitive. Other modifications can include those that confer altered substrate specificity, stability and/or sensitivity to inhibitors, such as TIMPs (tissue inhibitors of metalloproteases), or confer sensitivity to other conditions, such as temperature and/or pH. A modified enzyme typically has 60%, 70%, 80%, 85%, 90%, 91%, 92%, 93%, 94%, 95%, 96%, 97%, 98%, 99%, or more, sequence identity to a corresponding sequence of amino acids of a wild-type enzyme not including the modification(s). Typically, a modified enzyme retains an activity or sufficient activity (e.g., degradation of an ECM component) of a wild-type enzyme. It is understood that modifications conferring temperature sensitivity retain an activity or sufficient activity at the requisite temperature compared to a wild-type enzyme at the physiologic temperature.

[0117] As used herein, an unmodified matrix-metalloprotease (MMP) refers to a starting polypeptide that is selected for modification as provided herein. The starting polypeptide can be a naturally-occurring, wild-type form of a polypeptide. In addition, the starting polypeptide can be altered or mutated, such that it differs from a native wild-type isoform, but is nonetheless referred to herein as a starting unmodified polypeptide relative to the subsequently modified polypeptides produced herein. Thus, existing proteins known in the art that have been modified to have a desired increase or decrease in a particular activity or property compared to an unmodified reference protein can be selected and used as the starting unmodified polypeptide. For example, a protein that has been modified from its native form by one or more single amino acid changes, and possesses either an increase or decrease in a desired property, such as a change in an amino acid residue or residues to alter glycosylation, can be selected for modification, and hence referred to herein as unmodified, for further modification. An unmodified MMP polypeptide includes human and non-human MMPs, and also includes various forms thereof, including the precursor, zymogen, mature or catalytically active fragment thereof. Exemplary unmodified hyaluronan-degrading enzymes are any set forth in SEQ ID NOS:17, 20, 23, 26, 29, 32, 35, 38, 41, 44, 47, 50, 53, 56, 59, 62, 65, 68, 71, 74, 77, 80, 83, or mature or catalytically active forms thereof, or variants of any of such forms, such as those that exhibit at least 60%, 70%, 75%, 80%, 85%, 86%, 87%, 88%, 89%, 90%, 91%, 92%, 93%, 94%, 95%, 96%, 97%, 98%, 99%, or more, sequence identity to any of SEQ ID NOS:17, 20, 23, 26, 29, 32, 35, 38, 41, 44, 47, 50, 53, 56, 59, 62, 65, 68, 71, 74, 77, 80, or 83. It is understood that an unmodified MMP generally is one that does not contain the modification(s), such as amino acid replacement(s), of a modified MMP. The unmodified form can be a mature form or a form that can be processed for administration as a mature form (e.g., a zymogen form). Exemplary of an unmodified MMP is a mature MMP, such as any MMP polypeptide set forth in any of SEQ ID NOS:5, 132, 133, 134, 135, 137, 138, 140, 143 or 145 or a catalytically active fragment thereof, or any form or variant thereof that has a sequence of amino acids that exhibits at least 70%, 75%, 80%, 85%, 86%, 87%, 88%, 89%, 90%, 91%, 92%, 93%, 94%, 95%, 96%, 97%, 98%, 99%, or more, sequence identity to any of SEQ ID NOS:5, 132, 133, 134, 135, 137, 138, 140, 143 or 145, or a catalytically active fragment thereof.

[0118] As used herein, “at a position corresponding to” or recitation that nucleotides or amino acid positions “correspond to” nucleotides or amino acid positions in a disclosed sequence, such as set forth in the Sequence Listing, refers to nucleotides or amino acid positions identified upon alignment with the disclosed sequence to maximize identity using a standard alignment algorithm, such as the GAP algorithm. For purposes herein, exemplary positions for modification are with reference to positions set forth in SEQ ID NO:2, and alignment of a MMP to identify a position corresponding to the noted position, is to the amino acid sequence set forth in any of SEQ ID NO:2 (see, e.g., FIGS. 2A-2C, 3A-3C, and 4). By aligning the sequences, one skilled in the art can identify corresponding residues, for example, using conserved and identical amino acid residues as guides. In general, to identify corresponding positions, the sequences of amino acids are aligned so that the highest order match is obtained (see, e.g., Computational Molecular Biology, Lesk, A. M., ed., Oxford University Press, New York, 1988; Biocomputing: Informatics and Genome Projects, Smith, D. W., ed., Academic Press, New York, 1993; Computer Analysis of Sequence Data, Part I, Griffin, A. M., and Griffin, H. G., eds., Humana Press, New Jersey, 1994; Sequence Analysis in Molecular Biology, von Heinje, G., Academic Press, 1987; and Sequence Analysis Primer, Gribskov, M. and Devereux, J., eds., M Stockton Press, New York, 1991; and Carrillo et al. (1988) SIAM J Applied Math 48:1073). FIGS. 2A-2C illustrate exemplary alignments and identification of exemplary corresponding residues for replacement.

[0119] As used herein, a calcium-sensitive (cs) mutant or mutation or variant or modification with reference to a matrix metalloprotease (e.g., csMMP) refers to a polypeptide that is modified so that it exhibits higher dependency on the presence of calcium (Ca²⁺) for enzymatic activity, and thus exhibits increased calcium sensitivity, compared to the unmodified or reference MMP that does not contain the modification(s). A calcium-sensitive mutant exhibits reduced activity in the presence of physiological calcium concentrations (e.g., 1-1.3 mM Ca²⁺) compared to in the presence of calcium concentrations that are greater than physiological levels (e.g., 10 mM Ca²⁺). For purposes herein, a csMMP is generally a MMP that exhibits reduced activity or is substantially inactive in the physiologic environment of the ECM unless exposed to high concentrations of calcium greater than physiological levels. For example, the concentration of calcium at which a csMMP is active is a Ca²⁺ concentration of about or greater than about 2 mM to 100 mM Ca²⁺. Calcium-sensitive mutants used in the methods provided herein exhibit enzymatic activity at physiological concentrations of calcium that is or is about 1%, 2%, 3%, 4%, 5%, 6%, 7%, 8%, 9%, 10%, 20%, 30%, 40%, 50%, 60%, 70%, 80% or 90% up to less then 100% of the activity in the presence of calcium at greater than physiological concentrations. The calcium-sensitive mutants used in the methods provided herein also exhibit 1%, 2%, 3%, 4%, 5%, 6%, 7%, 8%, 9%, 10%, 20%, 30%, 40%, 50%, 60%, 70%, 80% or 90%, up to less then 100%, of the activity at physiological concentrations of calcium as compared to the enzyme that is not modified (e.g., wild-type enzyme) at physiological concentrations of calcium, for example in the interstitial space (e.g., 1-1.3 mM Ca²⁺).

[0120] As used herein, the ratio of enzymatic activity at high concentrations of calcium greater than physiological levels compared to physiological calcium concentrations refers to the relation of enzymatic activity at the high concentrations (e.g., 10 mM Ca²⁺) and physiological concentrations (e.g., 1-1.3 mM Ca²⁺) of calcium. It is expressed by the quotient of the division of the activity at high calcium concentrations by the activity at physiological calcium concentrations. It is understood that in determining enzymatic activity and the ratio of enzymatic activity, the enzymatic activity at the high and physiological calcium concentrations is measured under the same assay conditions, except for the difference in calcium concentration.

[0121] As used herein, physiological calcium concentration or physiological calcium levels refers to calcium concentrations maintained in the body, in particular, in the interstitial or extracellular space, such as in the extracellular matrix. Such concentrations are approximately 1-1.3 mM Ca²⁺, for example, at or about 1, 1.1, 1.2, or 1.3 mM Ca²⁺. It is understood that the normal range of calcium concentration varies depending on factors such as the particular organ, circulating hormone (e.g., parathyroid hormone and calcitonin) levels in the subject, subject vitamin D levels and other factors. For example, several medical conditions can alter calcium concentrations. For example, hyperparathyroidism, malignancy, vitamin D metabolic disorders, disorders related to high bone-turnover rates, and renal failure can result in elevated blood calcium levels (hypercalcemia) which can result in elevated interstitial calcium concentrations. In contrast, hypocalcemia can result from parathyroid hormone deficiency (e.g., hypoparathyroidism), vitamin D deficiency, high magnesium levels (hypermagnesemia) or low magnesium levels (hypomagnesemia), or chronic renal failure. For purposes herein, the physiological calcium concentration is the concentration of calcium that exists for a non-fasting subject that is not experiencing hypercalcemia or hypocalcemia.

[0122] For purposes herein, “high calcium concentration,” or “high concentrations of calcium” refers to concentrations of calcium that are greater than physiological levels of calcium at the site of treatment. For example, the physiological calcium concentration in the interstitial space is approximately 1 to 1.3 mM Ca²⁺. Thus, high calcium concentrations include calcium concentrations that are greater than 1 to 1.3 mM Ca²⁺, for example at or greater than 2 mM, 3 mM, 4 mM, 5 mM, 6 mM, 7 mM, 8 mM, 9 mM, 10 mM, 15 mM, 20 mM, 25 mM, 50 mM, 100 mM or more than 100 mM Ca²⁺. Typically, a high calcium concentration is one that contains sufficient calcium to enable csMMP activity.

[0123] As used herein, reference to an enzyme that is conditionally active refers to an enzyme whose activity is regulated by an exogenous factor such that it is active for a limited time or for a limited duration because the activity of the enzyme dissipates and/or is neutralized over time as the exogenous factor diffuses or becomes unavailable. Generally, the exogenous factor is a factor or agent that is not present at the site of administration. In particular, the exogenous factor or agent is one that is not present in the physiological environment of the ECM of a subject. Thus, by virtue of the absence of the exogenous factor required for activity, the activity of the enzyme is reduced and can be rendered sufficiently inactive to achieve a therapeutic effect.

[0124] As used herein, “temporal or conditional cleavage of a component of the ECM,” with reference to a pharmaceutical composition, means that the pharmaceutical composition is calcium-sensitive and exhibits conditional activity that is regulated by calcium concentration.

[0125] As used herein, “conditional activity” or “regulated activity,” with reference to the presence of calcium, means that the activity of the enzyme is regulated by calcium, such that it is active for a limited time or for a limited duration as the calcium diffuses away or becomes unavailable. With reference to modified MMPs provided herein, conditional activity is conferred by the requirement for high concentrations greater than physiological concentrations of calcium for activity. Accordingly, the high concentration of calcium greatef than physiological concentrations of calcium is not present in the physiological environment of the ECM of a subject, where the concentrations of calcium are physiological levels (e.g., 1-1.3 mM). By virtue of the fact that sufficient calcium concentrations are not present at the site of administration of a csMMP enzyme, additional Ca²⁺ must be added exogenously. Over time, the Ca²⁺ will dissipate, such that sufficient levels of Ca²⁺ are no longer present to maintain the activity of the enzyme. Hence, the csMMP enzyme will be active for a limited or predetermined time upon administration, and thus is a conditionally active enzyme that can be temporally controlled by calcium availability.

[0126] As used herein, “limited time” or “limited duration” with the reference to activity of an enzyme means that the activity of the enzyme is restricted in duration or time, for example, because the activity lessens or is reduced over a time period. The specific extent of time until the restricted activity is a function of the particular conditions regulating activity of the enzyme. For example, for purposes herein, the activity of an enzyme is restricted by exposure to physiological concentrations of calcium.

[0127] As used herein, “predetermined time” means a limited time that is known before and can be controlled. The dissipation and/or neutralization of an activation condition required for an enzyme's activity can be titrated or otherwise empirically determined so that the time required for an active enzyme to become inactive is known. For purposes herein, for example, an enzyme can be active for a predetermined time that is or is about up to 1 minute, 2 minutes, 3 minutes, 4 minutes, 5 minutes, 6 minutes, 7 minutes, 8 minutes, 9 minutes, 10 minutes, 15 minutes, 20 minutes, 30 minutes, 1 hour, 2 hours, 3 hours, or 4 hours, or more. The predetermined time can be controlled by the subject or the treating physician, for example, by administering a formulation containing sufficiently high concentrations of calcium to render the enzyme active for the pre-determined amount of time. Further, it is understood that reversible enzymes used in the methods provided herein can be re-activated by exposure to high calcium concentrations (e.g., 10 mM Ca²⁺), and thereby can be active for an additional predetermined time.

[0128] As used herein, reversible refers to a modified enzyme whose activity is dependent on calcium, and whose activity is capable of being recovered or partially recovered upon exposure to deprivation of calcium, followed by re-exposure to a high calcium concentration (e.g., 10 mM Ca²⁺). Hence, the activity of a reversible calcium-sensitive enzyme, once it is deprived of calcium and then re-exposed to activating calcium concentrations, is the same or substantially retained as compared to the activity of the enzyme exposed only to high calcium concentrations (e.g., 10 mM Ca²⁺) and is greater then the activity of the enzyme exposed only to physiological concentrations of calcium. For example, upon return to conditions of high calcium from low (e.g., physiological) levels of calcium, reversible enzymes exhibit at or about 120%, 125%, 130%, 140%, 150%, 160%, 170%, 180%, 200% or more of the activity of the enzyme exposed only to the physiological calcium concentrations and retain the activity of the enzyme exposed only to high calcium concentrations (e.g., 10 mM Ca²⁺).

[0129] As used herein, irreversible or nonreversible refers to a modified enzyme whose enzymatic activity is dependent on high calcium concentrations (e.g., 10 mM Ca²⁺), but whose activity is not capable of being recovered following exposure to physiological calcium concentrations and re-exposure to high calcium concentrations (e.g., 10 mM Ca²⁺). Hence, the activity of an irreversible enzyme once it is deprived of sufficient calcium is less than the activity of the enzyme exposed only to high calcium concentrations (e.g., 10 mM Ca²⁺) and also is less than or the same or substantially the same as the activity of the enzyme only in the presence of physiological calcium concentrations (e.g., 1-1.3 mM Ca²⁺). For example, upon return to high calcium concentrations, irreversible enzymes exhibit at or about 20%, 30%, 40%, 50%, 60%, 70%, 80%, 90%, 100%, 105%, 110%, 115%, or 120% of the activity at physiological calcium concentrations and less than 100% of the activity of the enzyme exposed only to high calcium concentrations (e.g., 10 mM Ca²⁺).

[0130] As used herein, a domain refers to a portion (a sequence of three or more, generally 5 or 7 or more amino acids) of a polypeptide that is structurally and/or functionally distinguishable or definable. For example, a domain includes those portions that can form an independently folded structure within a protein made up of one or more structural motifs (e.g., combinations of alpha helices and/or beta strands connected by loop regions) and/or that is recognized by virtue of a functional activity, such as kinase activity. A protein can have one, or more than one, distinct domains. For example, a domain can be identified, defined or distinguished by homology of the sequence therein to related family members, such as homology and motifs that define an extracellular domain. In another example, a domain can be distinguished by its function, such as by enzymatic activity, e.g., kinase activity, or an ability to interact with a biomolecule, such as DNA binding, ligand binding, and dimerization. A domain independently can exhibit a function or activity such that the domain independently, or fused to another molecule, can perform an activity, such as, for example, proteolytic activity or ligand binding. A domain can be a linear sequence of amino acids or a non-linear sequence of amino acids from the polypeptide. Many polypeptides contain a plurality of domains. For example, the domain structure of MMPs is set forth in FIG. 1. Those of skill in the art are familiar with domains and can identify them by virtue of structural and/or functional homology with other such domains.

[0131] As used herein, a catalytic domain refers to any part of a polypeptide that exhibits a catalytic or enzymatic function. Such domains or regions typically interact with a substrate to result in catalysis thereof. For MMPs, the catalytic domain contains a zinc-binding motif, which contains the Zn²⁺ ion bound by three histidine residues and is represented by the conserved sequence HExGHxxGxxH (SEQ ID NO:85).

[0132] As used herein, a proline rich linker (also called the hinge region) refers to a flexible hinge or linker region that has no determinable function. Such a region is typically is found between domains or regions and contributes to the flexibility of a polypeptide.

[0133] As used herein, a hemopexin-binding domain or hemopexin-like C-terminal domain refers to the C-terminal region of MMP. It is a four-bladed β-propeller structure which is involved in protein-protein interactions. For example, the hemopexin-binding domain of MMPs interacts with various substrates and also interacts with inhibitors, for example, tissue inhibitors of metalloproteases (TIMPs).

[0134] As used herein, “consisting essentially of” or recitation that a polypeptide consists essentially of a particular domain, for example, the catalytic domain, means that the only MMP portion of the polypeptide is the domain or a catalytically active portion thereof. The polypeptide optionally can include additional non-MMP-derived sequences of amino acids, typically at least 3, 4, 5, 6 or more, such as by insertion into another polypeptide or linkage thereto.

[0135] As used herein, a “zymogen” refers to an enzyme that is an inactive precursor of and requires some change, such as chemical modification or proteolysis of the polypeptide, to become active. Some zymogens also require the addition of co-factors such as, but not limited to, pH, ionic strength, metal ions, reducing agents, or temperature for activation. Zymogens include the proenzyme form of enzymes. Hence, zymogens generally are inactive and can be converted to a mature polypeptide by chemical modification or catalytic or autocatalytic cleavage of the proregion from the zymogen in the presence or absence of additional cofactors.

[0136] As used herein, a prosegment or proregion or propeptide refers to a region or a segment that is cleaved to produce a mature protein. A propeptide is a sequence of amino acids positioned at the amino terminus of a mature polypeptide and can be as little as a few amino acids or can be a multidomain structure. This can include segments that function to suppress the enzymatic activity by masking the catalytic machinery. Propeptides also can act to maintain the stability of an enzyme.

[0137] As used herein, a “processing agent” refers to an agent that activates a MMP by facilitating removal of the propeptide or proregion from the zymogen or inactive form of the enzyme. A processing agent includes chemical agents, proteases and other agents such as acidic pH or heat. Exemplary processing agents include, but are not limited to, trypsin, furin, or 4-aminophenylmercuric acetate (APMA). Other exemplary processing agents are listed in Table 8.

[0138] As used herein, an active enzyme refers to an enzyme that exhibits enzymatic activity. For purposes herein, active enzymes are those that cleave any one or more components of the ECM, such as collagen. Active enzymes include those that are processed from the zymogen form into the mature form.

[0139] As used herein, a “catalytically active fragment” refers to a polypeptide fragment that contains the catalytically active domain of the enzyme sufficient to exhibit activity. Hence, a catalytically active fragment is the portion that, under appropriate conditions (e.g., the presence of sufficient calcium concentrations), can exhibit catalytic activity. For example, a catalytically active fragment of a csMMP-1 (containing at least one mutation that confers a phenotype of increased calcium dependency) exhibits activity when it is provided at the requisite calcium concentration (e.g., 10 mM), but exhibits substantially reduced or no activity at physiological calcium concentrations (e.g., 1-1.3 mM). Typically, a catalytically active fragment is a contiguous sequence of amino acids of a MMP polypeptide that contains the catalytic domain and also the requisite portion of the molecule to recognize the substrate required for enzymatic activity. For example, the hemopexin domain of MMPs can be involved in binding and cleavage of substrates, and hence at least a portion of the hemopexin domain can be required for a fragment of a MMP to exhibit catalytic activity against a substrate. Typically, a catalytically active fragment of a MMP contains at least 100, 200, 300, 400, 500, or more, amino acid residues.

[0140] As used herein, reference to the “mature” form or “processed mature” form of an enzyme refers to enzymes that do not include the prosegment or proregion of the enzyme. It can be produced from the zymogen or proenzyme by activation cleavage in which a prosegment or proregion of the proenzyme is processed to produce the mature form. Hence, a processed mature enzyme lacks the sequence of amino acids that correspond to the prosegment or proregion. It is understood that reference to a processed mature form of an enzyme includes synthetic sequences, and thus does not necessarily require that the enzyme actually is processed to remove the prosegment or proregion. It is understood that any MMP enzyme that lacks the prosegment or proregion sequence is a mature enzyme. For example, SEQ ID NO:5 is the mature sequence of MMP-1. The processed mature form of an enzyme can exhibit activity, and is thus an active enzyme, under appropriate conditions. For example, under physiological conditions, the mature form of MMP-1 is an active enzyme. In contrast, csMMP-1 variants used in the methods provided herein exhibit substantially reduced or no activity at physiological calcium concentrations (e.g., 1-1.3 mM Ca²⁺ in the interstitial space), but are enzymatically active when exposed to increased Ca²⁺ concentrations (e.g., concentrations greater than 2 mM Ca²⁺, such as 10 mM Ca²⁺). Thus, the csMMP-1 is conditionally active.

[0141] As used herein, a “therapeutically effective amount” or a “therapeutically effective dose” refers to an agent, compound, material, or composition containing a compound that is at least sufficient to produce a therapeutic effect.

[0142] As used herein, sub-epidermal administration refers to any administration that results in delivery of the enzyme under the outer-most layer of the skin. Sub-epidermal administration does not include topical application onto the outer layer of the skin. Examples of sub-epidermal administration includes, but are not limited to, subcutaneous, intramuscular, intralesional and intradermal routes of administration.

[0143] As used herein, substrate refers to a molecule that is cleaved by an enzyme. Minimally, a target substrate includes a peptide containing the cleavage sequence recognized by the protease, and therefore can be two, three, four, five, six or more residues in length. A substrate also includes a full-length protein, allelic variant, isoform or any portion thereof that is cleaved by an enzyme. Additionally, a substrate includes a peptide or protein containing an additional moiety that does not affect cleavage of the substrate by the enzyme. For example, a substrate can include a four-amino acid peptide, or a full-length protein chemically linked to a fluorogenic moiety.

[0144] As used herein, collagen refers to a group of naturally occurring proteins that are made up of three polypeptide strands that are twisted together into a triple-helix structure. Each triple-helix associates to form collagen fibrils. Collagens are the most abundant protein in mammals, and have functions in tissue assembly or maintenance. Collagens are the main component of connective tissues. In particular, collagen is found in fibrous tissues, such as tendon, ligament and skin, and also is abundant in cornea, cartilage, bone, blood vessels, the gut and intervertebral disc. In particular, in the skin, collagen occurs in the extracellular matrix as elongated fibrils (generally made up of type I and type III collagens). Collagen is produced by fibroblasts.

[0145] As used herein, type I collagen refers to the type of collagen that is primarily found in bone, skin and tendons.

[0146] As used herein, type III collagen refers to the type of collagen that is the main component of reticular fibers, typically found in the skin, lung and aorta.

[0147] As used herein, cleavage refers to the breaking of peptide bonds or other bonds by an enzyme that results in one or more degradation products.

[0148] As used herein, “degrading,” “cleaving” or “proteolysis,” used interchangeably herein, with reference to a component of the ECM, refers to the ability of a matrix metalloprotease to catalyze the hydrolysis of covalent peptidic bonds in a matrix protein substrate, such as a collagen. This results in one or more degradation products that are fragments of the protein substrate. For example, certain collagenase MMPs (e.g., MMP-1) can degrade triple-helical fibrillar collagens into ¾ and ¼ fragments.

[0149] As used herein, activity refers to a functional activity or activities of a polypeptide or portion thereof associated with a full-length (complete) protein. Functional activities include, but are not limited to, biological activity, catalytic or enzymatic activity, antigenicity (ability to bind or compete with a polypeptide for binding to an anti-polypeptide antibody), immunogenicity, ability to form multimers, and the ability to specifically bind to a receptor or ligand for the polypeptide.

[0150] As used herein, enzymatic activity or catalytic activity or cleavage activity refers to the activity of a protease as assessed in proteolytic assays (e.g., in vitro proteolytic assays) that detect proteolysis of a selected substrate.

[0151] As used herein, “matrix metalloprotease activity” refers to the enzymatic activity of a protease as assessed in proteolytic assays (e.g., in vitro proteolytic assays) that detect proteolysis or cleavage of a matrix protein, and in particular a matrix protein of the extracellular matrix.

[0152] As used herein, “collagenase activity” refers to the enzymatic activity of a protease as assessed in proteolytic assays (e.g., in vitro proteolytic assay) that detect proteolysis or cleavage of a collagen.

[0153] As used herein, catalytic efficiency or k_{cat}/Kₘ is a measure of the efficiency with which a protease cleaves a substrate and is measured under steady state conditions as is well known to those skilled in the art. Kₘ is the Michaelis-Menton constant ([S] at one-half Vₘₐₓ) and k_{cat} is the Vₘₐₓ/[E_{T}], where E_{T} is the final enzyme concentration. The parameters k_{cat}, Kₘ and k_{cat}/Kₘ can be calculated by graphing the inverse of the substrate concentration versus the inverse of the velocity of substrate cleavage, and fitting to the Lineweaver-Burk equation (1/velocity=(Kₘ/Vₘₐₓ)(1/[S])+1/Vₘₐₓ; where Vₘₐₓ [E_{T}]k_{cat}). Any method to determine the rate of increase of cleavage over time in the presence of various concentrations of substrate can be used to calculate the specificity constant. For example, a substrate is linked to a fluorogenic moiety, which is released upon cleavage by a protease. By determining the rate of cleavage at different enzyme concentrations, k_{cat} can be determined for a particular protease.

[0154] As used herein, an inactive enzyme refers to an enzyme that exhibits substantially no activity (i.e., catalytic activity or cleavage activity), such as less than 10% of the maximum activity of the enzyme. The enzyme can be inactive by virtue of its conformation, the absence of sufficient calcium required for its activity, or the presence of an inhibitor or any other condition or factor or form that renders the enzyme substantially inactive.

[0155] As used herein, “retains an activity” refers to the activity exhibited by a csMMP polypeptide at a particular concentration of calcium compared to at another calcium concentration or to another polypeptide. For example, it is the activity a csMMP polypeptide exhibits as compared to an unmodified MMP polypeptide of the same form and under the same conditions. It also can be the activity a csMMP polypeptide exhibits as compared to the csMMP polypeptide at different calcium concentrations. Generally, a csMMP polypeptide that retains an activity exhibits increased or decreased activity compared to an unmodified polypeptide under the same conditions or compared to the unmodified polypeptide under different conditions. For example, the csMMP polypeptide can retain 40%, 50%, 60%, 70%, 80%, 90%, 100%, 110%, 120%, 130%, 140%, 150%, 160%, 170%, 180%, 190%, 200%, 300%, 400%, 500% or more of the enzymatic activity of its unmodified MMP counterpart.

[0156] As used herein, a human protein is one encoded by a nucleic acid molecule, such as DNA, present in the genome of a human, including all allelic variants and conservative variations thereof. A variant or modification of a protein is a human protein if the modification is based on the wild-type or prominent sequence of a human protein.

[0157] As used herein, hyaluronidase refers to an enzyme that degrades hyaluronic acid. Hyaluronidases include bacterial hyaluronidases (EC 4.2.99.1), hyaluronidases from leeches, other parasites, and crustaceans (EC 3.2.1.36), and mammalian-type hyaluronidases (EC 3.2.1.35). Hyaluronidases also include any of non-human origin including, but not limited to, murine, canine, feline, leporine, avian, bovine, ovine, porcine, equine, piscine, ranine, bacterial, and any from leeches, other parasites, and crustaceans. Exemplary non-human hyaluronidases include any set forth in any of SEQ ID NOS:106-129. Exemplary human hyaluronidases include HYAL1 (SEQ ID NO:93), HYAL2 (SEQ ID NO:94), HYAL3 (SEQ ID NO:95), HYAL4 (SEQ ID NO:96), and PH20 (SEQ ID NO:97). Also included amongst hyaluronidases are soluble human PH20 and soluble rHuPH20.

[0158] Reference to hyaluronidases includes precursor hyaluronidase polypeptides and mature hyaluronidase polypeptides (such as those in which a signal sequence has been removed), truncated forms thereof that have activity, and includes allelic variants and species variants, variants encoded by splice variants, and other variants, including polypeptides that have at least 40%, 45%, 50%, 55%, 65%, 70%, 75%, 80%, 85%, 90%, 95%, 96%, 97%, 98%, 99% or more sequence identity to the precursor polypeptide set forth in SEQ ID NO:97 or the mature form thereof. Hyaluronidases also include those that contain chemical or posttranslational modifications and those that do not contain chemical or posttranslational modifications. Such modifications include, but are not limited to, PEGylation, albumination, glycosylation, farnesylation, carboxylation, hydroxylation, phosphorylation, and other polypeptide modifications known in the art.

[0159] As used herein, soluble human PH20 or sHuPH20 includes mature polypeptides lacking all or a portion of the glycosylphosphatidylinositol (GPI) attachment site at the C-terminus, such that upon expression the polypeptides are soluble. Exemplary sHuPH20 polypeptides include mature polypeptides having an amino acid sequence set forth in any one of SEQ ID NOS:100-105, or a sequence of amino acids that exhibit at least 75%, 80%, 85%, 90%, 91%, 92%, 93%, 94%, 95%, 96%, 97%, 98%, 99%, or more, sequence identity to any of SEQ ID NOS:100-105. The precursor polypeptides for such exemplary sHuPH20 polypeptides include an amino acid signal sequence. Exemplary of a precursor is set forth in SEQ ID NO:97, which contains a 35 amino acid signal sequence at amino acid positions 1-35.

[0160] As used herein, soluble rHuPH20 refers to a soluble form of human PH20 that is recombinantly expressed in Chinese Hamster Ovary (CHO) cells. Soluble rHuPH20 is encoded by nucleic acid that includes the signal sequence and is set forth in SEQ ID NO:99. Also included are DNA molecules that are allelic variants thereof and other soluble variants. The nucleic acid encoding soluble rHuPH20 is expressed in CHO cells which secrete the mature polypeptide. As produced in the culture medium, there is heterogeneity at the C-terminus so that the product includes a mixture of species of SEQ ID NOS:100-105. Corresponding allelic variants and other variants also are included. Other variants can have 60%, 70%, 80%, 85%, 90%, 91%, 92%, 93%, 94%, 95%, 96%, 97%, 98%, 99% or more sequence identity with any of SEQ ID NOS:100-105, as long as they retain a hyaluronidase activity and are soluble.

[0161] As used herein, hyaluronidase activity refers to any activity exhibited by a hyaluronidase polypeptide. Such activities can be tested in vitro and/or in vivo and include, but are not limited to, enzymatic activity, such as to effect cleavage of hyaluronic acid, ability to act as a dispersing or spreading agent, and antigenicity.

[0162] As used herein, the residues of naturally occurring α-amino acids are the residues of those 20 α-amino acids found in nature which are incorporated into protein by the specific recognition of the charged tRNA molecule with its cognate mRNA codon in humans.

[0163] As used herein, nucleic acids include DNA, RNA and analogs thereof, including peptide nucleic acids (PNA) and mixtures thereof. Nucleic acids can be single or double-stranded. When referring to probes or primers, which are optionally labeled, such as with a detectable label, such as a fluorescent or radiolabel, single-stranded molecules are contemplated. Such molecules are typically of a length such that their target is statistically unique or of low copy number (typically less than 5, generally less than 3) for probing or priming a library. Generally, a probe or primer contains at least 14, 16 or 30 contiguous nucleotides of sequence complementary to or identical to a gene of interest. Probes and primers can be 10, 20, 30, 50, 100 or more nucleic acids long.

[0164] As used herein, a peptide refers to a polypeptide that is from 2 to 40 amino acids in length.

[0165] As used herein, the amino acids which occur in the various sequences of amino acids provided herein are identified according to their known, three-letter or one-letter abbreviations (Table 1). The nucleotides which occur in the various nucleic acid fragments are designated with the standard single-letter designations used routinely in the art.

[0166] As used herein, an “amino acid” is an organic compound containing an amino group and a carboxylic acid group. A polypeptide contains two or more amino acids. For purposes herein, amino acids include the twenty naturally-occurring amino acids, non-natural amino acids and amino acid analogs (i.e., amino acids wherein the a-carbon has a side chain).

[0167] As used herein, “amino acid residue” refers to an amino acid formed upon chemical digestion (hydrolysis) of a polypeptide at its peptide linkages. The amino acid residues described herein are presumed to be in the “L” isomeric form. Residues in the “D” isomeric form, which are so designated, can be substituted for any L-amino acid residue as long as the desired functional property is retained by the polypeptide. NH₂ refers to the free amino group present at the amino terminus of a polypeptide. COOH refers to the free carboxy group present at the carboxyl terminus of a polypeptide. In keeping with standard polypeptide nomenclature described in J. Biol. Chem., 243:3552-3559 (1969), and adopted in 37 C.F.R. §§1.821-1.822, abbreviations for amino acid residues are shown in Table 1:

TABLE 1
Table of Correspondence

SYMBOL

| 1-Letter | 3-Letter | Amino Acid |
|---|---|---|
| Y | Tyr | Tyrosine |
| G | Gly | Glycine |
| F | Phe | Phenylalanine |
| M | Met | Methionine |
| A | Ala | Alanine |
| S | Ser | Serine |
| I | Ile | Isoleucine |
| L | Leu | Leucine |
| T | Thr | Threonine |
| V | Val | Valine |
| P | Pro | Proline |
| K | Lys | Lysine |
| H | His | Histidine |
| Q | Gln | Glutamine |
| E | Glu | Glutamic Acid |
| Z | Glx | Glu and/or Gln |
| W | Trp | Tryptophan |
| R | Arg | Arginine |
| D | Asp | Aspartic Acid |
| N | Asn | Asparagine |
| B | Asx | Asn and/or Asp |
| C | Cys | Cysteine |
| X | Xaa | Unknown or Other |

[0168] It should be noted that all amino acid residue sequences represented herein by formulae have a left to right orientation in the conventional direction of amino-terminus to carboxyl-terminus. In addition, the phrase “amino acid residue” is broadly defined to include the amino acids listed in the Table of Correspondence (Table 1), and modified and unusual amino acids, such as those referred to in 37 C.F.R. §§1.821-1.822, and incorporated herein by reference. Furthermore, it should be noted that a dash at the beginning or end of an amino acid residue sequence indicates a peptide bond to a further sequence of one or more amino acid residues, to an amino-terminal group such as NH₂ or to a carboxyl-terminal group such as COOH.

[0169] As used herein, “naturally occurring amino acids” refers to the 20 L-amino acids that occur in polypeptides.

[0170] As used herein, “non-natural amino acid” refers to an organic compound that has a structure similar to a natural amino acid but has been modified structurally to mimic the structure and reactivity of a natural amino acid. Non-naturally occurring amino acids thus include, for example, amino acids or analogs of amino acids other than the 20 naturally-occurring amino acids and include, but are not limited to, the D-stereoisomers of amino acids. Exemplary non-natural amino acids are described herein and are known to those of skill in the art.

[0171] As used herein, suitable conservative substitutions of amino acids are known to those of skill in the art and can be made generally without altering the biological activity of the resulting molecule. Those of skill in the art recognize that, in general, single amino acid substitutions in non-essential regions of a polypeptide do not substantially alter biological activity (see e.g., Watson et al. Molecular Biology of the Gene, 4th Edition, 1987, The Benjamin/Cummings Pub. co., p. 224). Such substitutions can be made in accordance with those set forth in Table 2 as follows:

TABLE 2
Conservative and semi-conservative amino acid substitutions

| | | Exemplary |
|---|---|---|
| Original | Exemplary conservative | semi-conservative |
| residue | substitution | substitution |
| Ala (A) | Ser; Thr | Cys; Gly; Pro; Val |
| Arg (R) | Gln; His; Lys | Asp; Glu |
| Asn (N) | Asp; Gln; His; Lys; Glu | Arg; Gly; Ser; Thr |
| Asp (D) | Asn; Gln; Glu | Gly; His; Lys; Ser |
| Cys (C) | | Ala; Ser |
| Gln (Q) | Arg; Asn; Asp; Glu; His; Lys | Ser |
| Glu (E) | Asp; Asn; Gln; Lys | Arg; His; Ser |
| Gly (G) | | Ala; Asp; Asn; Ser |
| His (H) | Arg; Asn; Gln; Lys; Tyr | Asp; Glu; Phe |
| Ile (I) | Leu; Val; Met; Phe | |
| Leu (L) | Ile; Met; Phe; Val | |
| Lys (K) | Arg; Asn; Gln; Glu; His | Asp; Ser; Thr |
| Met (M) | Ile; Leu; Phe; Val | |
| Phe (F) | Ile; Met; Leu; Trp; Tyr | His; Val |
| Pro (P) | | Ala; Ser; Thr |
| Ser (S) | Ala; Thr | Asp; Asn; Cys; Gln; Glu; Gly; |
| | | Lys; Pro |
| Thr (T) | Ala; Ser | Asn; Lys; Pro; Val |
| Trp (W) | Phe; Tyr | |
| Tyr (Y) | His; Phe; Trp | |
| Val (V) | Ile; Leu; Met | Ala; Phe; Thr |

Other substitutions also are permissible and can be determined empirically or in accord with known conservative substitutions.

[0172] As used herein, a DNA construct is a single- or double-stranded, linear or circular DNA molecule that contains segments of DNA combined and juxtaposed in a manner not found in nature. DNA constructs exist as a result of human manipulation, and include clones and other copies of manipulated molecules.

[0173] As used herein, a DNA segment is a portion of a larger DNA molecule having specified attributes. For example, a DNA segment encoding a specified polypeptide is a portion of a longer DNA molecule, such as a plasmid or plasmid fragment, which, when read from the 5′ to 3′ direction, encodes the sequence of amino acids of the specified polypeptide.

[0174] As used herein, the term polynucleotide means a single- or double-stranded polymer of deoxyribonucleotides or ribonucleotide bases read from the 5′ to the 3′ end. Polynucleotides include RNA and DNA, and can be isolated from natural sources, synthesized in vitro, or prepared from a combination of natural and synthetic molecules. The length of a polynucleotide molecule is given herein in terms of nucleotides (abbreviated “nt”) or base pairs (abbreviated “bp”). The term nucleotides is used for single- and double-stranded molecules where the context permits. When the term is applied to double-stranded molecules it is used to denote overall length and will be understood to be equivalent to the term base pairs. It will be recognized by those skilled in the art that the two strands of a double-stranded polynucleotide can differ slightly in length and that the ends thereof can be staggered; thus, all nucleotides within a double-stranded polynucleotide molecule cannot be paired. Such unpaired ends will, in general, not exceed 20 nucleotides in length.

[0175] As used herein, “similarity” between two proteins or nucleic acids refers to the relatedness between the sequence of amino acids of the proteins or the nucleotide sequences of the nucleic acids. Similarity can be based on the degree of identity and/or homology of sequences of residues and the residues contained therein. Methods for assessing the degree of similarity between proteins or nucleic acids are known to those of skill in the art. For example, in one method of assessing sequence similarity, two amino acid or nucleotide sequences are aligned in a manner that yields a maximal level of identity between the sequences. “Identity” refers to the extent to which the amino acid or nucleotide sequences are invariant. Alignment of amino acid sequences, and to some extent nucleotide sequences, also can take into account conservative or semi-conservative differences and/or frequent substitutions in amino acids (or nucleotides). Conservative differences are those that preserve the physicochemical properties of the residues involved. Semi-conservative differences are those that preserve the steric conformation (i.e., size and/or shape) of the residues involved. Alignments can be global (alignment of the compared sequences over the entire length of the sequences and including all residues) or local (the alignment of a portion of the sequences that includes only the most similar region or regions).

[0176] As used herein, “sequence identity” refers to the number of identical or similar amino acids or nucleotide bases in a comparison between a test and a reference polypeptide or polynucleotide. Sequence identity can be determined by sequence alignment of nucleic acid or protein sequences to identify regions of similarity or identity. For purposes herein, sequence identity is generally determined by alignment to identify identical residues. Alignment can be local or global. Reference herein to sequence identity is generally a global alignment where the full-length of each sequence is compared. Matches, mismatches and gaps can be identified between compared sequences. Gaps are null amino acids or nucleotides inserted between the residues of aligned sequences so that identical or similar characters are aligned. Generally, there can be internal and terminal gaps. Sequence identity can be determined by taking into account gaps as the number of identical residues/length of the shortest sequence×100. When using gap penalties, sequence identity can be determined with no penalty for end gaps (e.g., terminal gaps are not penalized). Alternatively, sequence identity can be determined without taking into account gaps as the number of identical positions/length of the total aligned sequence×100.

[0177] As used herein, a “global alignment” is an alignment that aligns two sequences from beginning to end, aligning each letter in each sequence only once. An alignment is produced, regardless of whether or not there is similarity or identity between the sequences. For example, 50% sequence identity based on “global alignment” means that in an alignment of the full sequence of two compared sequences each of 100 nucleotides in length, 50% of the residues are the same. It is understood that global alignment also can be used in determining sequence identity even when the length of the aligned sequences is not the same. The differences in the terminal ends of the sequences will be taken into account in determining sequence identity, unless the “no penalty for end gaps” is selected. Generally, a global alignment is used on sequences that share significant similarity over most of their length. Exemplary algorithms for performing global alignment include the Needleman-Wunsch algorithm (Needleman et al. (1970) J Mol. Biol. 48:443). Exemplary programs for performing global alignment are publicly available and include the Global Sequence Alignment Tool available at the National Center for Biotechnology Information (NCBI) website (ncbi.nlm.nih.gov/), and the program available at deepc2.psi.iastate.edu/aat/align/align.html.

[0178] As used herein, a “local alignment” is an alignment that aligns two sequences, but only aligns those portions of the sequences that share similarity or identity. Hence, a local alignment determines if sub-segments of one sequence are present in another sequence. If there is no similarity, no alignment will be returned. Local alignment algorithms include BLAST or Smith-Waterman algorithm (Adv. Appl. Math. (1981) 2:482). For example, 50% sequence identity based on “local alignment” means that in an alignment of the full sequence of two compared sequences of any length, a region of similarity or identity of 100 nucleotides in length has 50% of the residues that are the same in the region of similarity or identity.

[0179] For purposes herein, sequence identity can be determined by standard alignment algorithm programs used with default gap penalties established by each supplier. Default parameters for the GAP program can include: (1) a unary comparison matrix (containing a value of 1 for identities and 0 for non-identities) and the weighted comparison matrix of Gribskov et al. (1986) Nucl. Acids Res. 14: 6745, as described by Schwartz and Dayhoff, eds., Atlas of Protein Sequence and Structure, National Biomedical Research Foundation, pp. 353-358 (1979); (2) a penalty of 3.0 for each gap and an additional 0.10 penalty for each symbol in each gap; and (3) no penalty for end gaps. Whether any two nucleic acid molecules have nucleotide sequences or any two polypeptides have amino acid sequences that are at least 80%, 85%, 90%, 95%, 96%, 97%, 98% or 99% “identical,” or other similar variations reciting a percent identity, can be determined using known computer algorithms based on local or global alignment (see e.g., wikipedia.org/wiki/Sequence_alignment_software, providing links to dozens of known and publicly available alignment databases and programs). Generally, for purposes herein, sequence identity is determined using computer algorithms based on global alignment, such as the Needleman-Wunsch Global Sequence Alignment tool available from NCBI/BLAST (blast.ncbi.nlm.nih.gov/Blast.cgi?CMD=Web&Page_TYPE=BlastHome); LAlign (William Pearson implementing the Huang and Miller algorithm (Adv. Appl. Math. (1991) 12:337-357)); and the program from Xiaoqui Huang available at deepc2.psi.iastate.edu/aat/align/align.html. Local alignment also can be used when the sequences being compared are substantially the same length.

[0180] Therefore, as used herein, the term “identity” represents a comparison or alignment between a test and a reference polypeptide or polynucleotide. In one non-limiting example, “at least 90% identical to” refers to percent identities from 90 to 100% relative to the reference polypeptide or polynucleotide. Identity at a level of 90% or more is indicative of the fact that, assuming for exemplification purposes a test and reference polypeptide or polynucleotide length of 100 amino acids or nucleotides are compared, no more than 10% (i.e., 10 out of 100) of amino acids or nucleotides in the test polypeptide or polynucleotide differs from that of the reference polypeptides. Similar comparisons can be made between a test and reference polynucleotides. Such differences can be represented as point mutations randomly distributed over the entire length of an amino acid sequence or they can be clustered in one or more locations of varying length up to the maximum allowable, e.g., 10/100 amino acid difference (approximately 90% identity). Differences also can be due to deletions or truncations of amino acid residues. Differences are defined as nucleic acid or amino acid substitutions, insertions or deletions. Depending on the length of the compared sequences, at the level of homologies or identities above about 85-90%, the result can be independent of the program and gap parameters set; such high levels of identity can be assessed readily, often without relying on software.

[0181] As used herein, an aligned sequence refers to the use of homology (similarity and/or identity) to align corresponding positions in a sequence of nucleotides or amino acids. Typically, two or more sequences that are related by 50% or more identity are aligned. An aligned set of sequences refers to two or more sequences that are aligned at corresponding positions and can include aligning sequences derived from RNAs, such as ESTs and other cDNAs, aligned with genomic DNA sequence.

[0182] As used herein, “primer” refers to a nucleic acid molecule that can act as a point of initiation of template-directed DNA synthesis under appropriate conditions (e.g., in the presence of four different nucleoside triphosphates and a polymerization agent, such as DNA polymerase, RNA polymerase or reverse transcriptase) in an appropriate buffer and at a suitable temperature. It will be appreciated that certain nucleic acid molecules can serve as a “probe” and as a “primer.” A primer, however, has a 3′ hydroxyl group for extension. A primer can be used in a variety of methods, including, for example, polymerase chain reaction (PCR), reverse-transcriptase (RT)—PCR, RNA PCR, LCR, multiplex PCR, panhandle PCR, capture PCR, expression PCR, 3′ and 5′ RACE, in situ PCR, ligation-mediated PCR and other amplification protocols.

[0183] As used herein, “primer pair” refers to a set of primers that includes a 5′ (upstream) primer that hybridizes with the 5′ end of a sequence to be amplified (e.g., by PCR) and a 3′ (downstream) primer that hybridizes with the complement of the 3′ end of the sequence to be amplified.

[0184] As used herein, “specifically hybridizes” refers to annealing, by complementary base-pairing, of a nucleic acid molecule (e.g., an oligonucleotide) to a target nucleic acid molecule. Those of skill in the art are familiar with in vitro and in vivo parameters that affect specific hybridization, such as length and composition of the particular molecule. Parameters particularly relevant to in vitro hybridization further include annealing and washing temperature, buffer composition and salt concentration. Exemplary washing conditions for removing non-specifically bound nucleic acid molecules at high stringency are 0.1×SSPE, 0.1% SDS, 65° C., and at medium stringency are 0.2×SSPE, 0.1% SDS, 50° C. Equivalent stringency conditions are known in the art. The skilled person can readily adjust these parameters to achieve specific hybridization of a nucleic acid molecule to a target nucleic acid molecule appropriate for a particular application. Complementary, when referring to two nucleotide sequences, means that the two sequences of nucleotides are capable of hybridizing, typically with less than 25%, 15% or 5% mismatches between opposed nucleotides. If necessary, the percentage of complementarity will be specified. Typically, the two molecules are selected such that they will hybridize under conditions of high stringency.

[0185] As used herein, “substantially identical to a product” means sufficiently similar so that the property of interest is sufficiently unchanged so that the substantially identical product can be used in place of the product.

[0186] As used herein, it also is understood that the terms “substantially identical” or “similar” vary with the context as understood by those skilled in the relevant art.

[0187] As used herein, an allelic variant or allelic variation references any of two or more alternative forms of a gene occupying the same chromosomal locus. Allelic variation arises naturally through mutation, and can result in phenotypic polymorphism within populations. Gene mutations can be silent (no change in the encoded polypeptide) or can encode polypeptides having altered amino acid sequences. The term “allelic variant” also is used herein to denote a protein encoded by an allelic variant of a gene. Typically, the reference form of the gene encodes a wild-type form and/or predominant form of a polypeptide from a population or single reference member of a species. Typically, allelic variants, which include variants between and among species typically have at least 80%, 90% or greater amino acid identity with a wild-type and/or predominant form from the same species; the degree of identity depends upon the gene and whether comparison is interspecies or intraspecies. Generally, intraspecies allelic variants have at least about 80%, 85%, 90% or 95% identity or greater with a wild-type and/or predominant form, including 96%, 97%, 98%, 99% or greater identity with a wild-type and/or predominant form of a polypeptide. Reference to an allelic variant herein generally refers to variations in proteins among members of the same species.

[0188] As used herein, “allele,” which is used interchangeably herein with “allelic variant” refers to alternative forms of a gene or portions thereof. Alleles occupy the same locus or position on homologous chromosomes. When a subject has two identical alleles of a gene, the subject is said to be homozygous for that gene or allele. When a subject has two different alleles of a gene, the subject is said to be heterozygous for the gene. Alleles of a specific gene can differ from each other in a single nucleotide or several nucleotides, and can include substitutions, deletions, and insertions of nucleotides. An allele of a gene also can be a form of a gene containing a mutation.

[0189] As used herein, species variants refer to variants in polypeptides among different species, including different mammalian species, such as mouse and human.

[0190] As used herein, a splice variant refers to a variant produced by differential processing of a primary transcript of genomic DNA that results in more than one type of mRNA.

[0191] As used herein, modification is in reference to modification of a sequence of amino acids of a polypeptide or a sequence of nucleotides in a nucleic acid molecule and includes deletions, insertions, and replacements of amino acids and nucleotides, respectively. Methods of modifying a polypeptide are routine to those of skill in the art, such as by using recombinant DNA methodologies.

[0192] As used herein, the term promoter means a portion of a gene containing DNA sequences that provide for the binding of RNA polymerase and initiation of transcription. Promoter sequences are commonly, but not always, found in the 5′ non-coding region of genes.

[0193] As used herein, isolated or purified polypeptide or protein or biologically-active portion thereof is substantially free of cellular material or other contaminating proteins from the cell or tissue from which the protein is derived, or substantially free from chemical precursors or other chemicals when chemically synthesized. Preparations can be determined to be substantially free if they appear free of readily detectable impurities as determined by standard methods of analysis, such as thin layer chromatography (TLC), gel electrophoresis and high performance liquid chromatography (HPLC), used by those of skill in the art to assess such purity, or sufficiently pure such that further purification would not detectably alter the physical and chemical properties, such as enzymatic and biological activities, of the substance. Methods for purification of the compounds to produce substantially chemically pure compounds are known to those of skill in the art. A substantially chemically pure compound, however, can be a mixture of stereoisomers. In such instances, further purification might increase the specific activity of the compound.

[0194] The term substantially free of cellular material includes preparations of proteins in which the protein is separated from cellular components of the cells from which it is isolated or recombinantly-produced. In one embodiment, the term substantially free of cellular material includes preparations of enzyme proteins having less that about 30% (by dry weight) of non-enzyme proteins (also referred to herein as a contaminating protein), generally less than about 20% of non-enzyme proteins or 10% of non-enzyme proteins or less that about 5% of non-enzyme proteins. When the enzyme protein is recombinantly produced, it also is substantially free of culture medium, i.e., culture medium represents less than about or at 20%, 10% or 5% of the volume of the enzyme protein preparation.

[0195] As used herein, the term substantially free of chemical precursors or other chemicals includes preparations of enzyme proteins in which the protein is separated from chemical precursors or other chemicals that are involved in the synthesis of the protein. The term includes preparations of enzyme proteins having less than about 30% (by dry weight) 20%, 10%, 5% or less of chemical precursors or non-enzyme chemicals or components.

[0196] As used herein, synthetic, with reference to, for example, a synthetic nucleic acid molecule or a synthetic gene or a synthetic peptide, refers to a nucleic acid molecule or polypeptide molecule that is produced by recombinant methods and/or by chemical synthesis methods.

[0197] As used herein, production by recombinant means by using recombinant DNA methods means the use of the well known methods of molecular biology for expressing proteins encoded by cloned DNA.

[0198] As used herein, vector (or plasmid) refers to discrete elements that are used to introduce a heterologous nucleic acid into cells for either expression or replication thereof. The vectors typically remain episomal, but can be designed to effect integration of a gene or portion thereof into a chromosome of the genome. Also contemplated are vectors that are artificial chromosomes, such as yeast artificial chromosomes and mammalian artificial chromosomes. Selection and use of such vehicles are well known to those of skill in the art.

[0199] As used herein, an expression vector includes vectors capable of expressing DNA that is operatively linked with regulatory sequences, such as promoter regions, that are capable of effecting expression of such DNA fragments. Such additional segments can include promoter and terminator sequences, and optionally can include one or more origins of replication, one or more selectable markers, an enhancer, a polyadenylation signal, and the like. Expression vectors are generally derived from plasmid or viral DNA, or can contain elements of both. Thus, an expression vector refers to a recombinant DNA or RNA construct, such as a plasmid, a phage, recombinant virus or other vector that, upon introduction into an appropriate host cell, results in expression of the cloned DNA. Appropriate expression vectors are well known to those of skill in the art and include those that are replicable in eukaryotic cells and/or prokaryotic cells and those that remain episomal, or those which integrate into the host cell genome.

[0200] As used herein, vector also includes “virus vectors” or “viral vectors.” Viral vectors are engineered viruses that are operatively linked to exogenous genes to transfer (as vehicles or shuttles) the exogenous genes into cells.

[0201] As used herein, operably or operatively linked, when referring to DNA segments, means that the segments are arranged so that they function in concert for their intended purposes, e.g., transcription initiates in the promoter and proceeds through the coding segment to the terminator.

[0202] As used herein, the term assessing is intended to include quantitative and qualitative determination in the sense of obtaining an absolute value for the activity of a protease, or a domain thereof, present in the sample, and also of obtaining an index, ratio, percentage, visual, or other value indicative of the level of the activity. Assessment can be direct or indirect and the chemical species actually detected need not of course be the proteolysis product itself but can for example be a derivative thereof or some further substance. For example, detection of a cleavage product of a substrate, such as by SDS-PAGE and protein staining with Coomassie blue.

[0203] As used herein, biological activity refers to the in vivo activities of a compound or physiological responses that result upon in vivo administration of a compound, composition or other mixture. Biological activity, thus, encompasses therapeutic effects and pharmaceutical activity of such compounds, compositions and mixtures. Biological activities can be observed in in vitro systems designed to test or use such activities. Thus, for purposes herein, a biological activity of a protease is its catalytic activity in which a polypeptide is hydrolyzed.

[0204] As used herein, “equivalent,” when referring to two sequences of nucleic acids, means that the two sequences in question encode the same sequence of amino acids or equivalent proteins. When equivalent is used in referring to two proteins or peptides, it means that the two proteins or peptides have substantially the same amino acid sequence with only amino acid substitutions that do not substantially alter the activity or function of the protein or peptide. When equivalent refers to a property, the property does not need to be present to the same extent (e.g., two peptides can exhibit different rates of the same type of enzymatic activity), but the activities are usually substantially the same.

[0205] As used herein, “modulate” and “modulation” or “alter” refer to a change of an activity of a molecule, such as a protein. Exemplary activities include, but are not limited to, biological activities, such as signal transduction. Modulation can include an increase in the activity (i.e., up-regulation or agonist activity) a decrease in activity (i.e., down-regulation or inhibition) or any other alteration in an activity (such as a change in periodicity, frequency, duration, kinetics or other parameter). Modulation can be context dependent and typically modulation is compared to a designated state, for example, the wild-type protein, the protein in a constitutive state, or the protein as expressed in a designated cell type or condition.

[0206] As used herein, a composition refers to any mixture. It can be a solution, suspension, liquid, powder, paste, aqueous, non-aqueous or any combination thereof.

[0207] As used herein, a combination refers to any association between or among two or more items. The combination can be two or more separate items, such as two compositions or two collections, can be a mixture thereof, such as a single mixture of the two or more items, or any variation thereof. The elements of a combination are generally functionally associated or related.

[0208] As used herein, a kit is a packaged combination that optionally includes other elements, such as additional reagents and instructions for use of the combination or elements thereof.

[0209] As used herein, “locus” with reference to administration refers to the particular site or place that administration occurs. For example, a locus can refer to a site of injection or infusion of an agent.

[0210] As used herein, “disease or disorder” refers to a pathological condition in an organism resulting from a cause or condition including, but not limited to, infections, acquired conditions, and genetic conditions, and characterized by identifiable symptoms. Diseases and disorders of interest herein are those involving components of the ECM, for example, diseases or disorders involving collagen.

[0211] As used herein, a fibrotic disease or condition refers to a disease or condition associated with the irregular formation of fibrous tissue that is generated due to the production, accumulation or overproduction of a component of the ECM, in particular a collagen. For example, the pathogenesis of fibrotic diseases and conditions can be due to the irregular formation of collagen fibers, such as the formation of fibrous septae, fibrous scars, fibrous plaques, fibrous nodes or nodules or fibrous cords. Exemplary of fibrotic diseases and conditions include, but are not limited to, localized scleroderma, Peyronie's Disease, Dupuytren's contracture, hypertrophic scarring, keloids, cellulite, frozen shoulders, existing scars, lymphedema, lipoma and other diseases and conditions described herein or known in the art.

[0212] As used herein, an ECM-mediated disease or condition is one where any one or more ECM components is involved in the pathology or etiology. For purposes herein, an ECM-mediated disease or condition includes those that are caused by an increased deposition or accumulation of one or more ECM components, such as collagen. Such conditions include, but are not limited to, cellulite, Duputyren's syndrome, Peyronie's disease, frozen shoulders, existing scars such as keloids, scleroderma and lymphedema.

[0213] As used herein, collagen-mediated disease or condition is a fibrotic disease or condition that is caused by the production, overproduction or accumulation of collagen fibers. In particular, the collagen-mediated disease or condition is an ECM-mediated disease or condition involving type I or type III collagen.

[0214] As used herein, “treating” a subject with a disease or condition means that the subject's symptoms are partially or totally alleviated, or remain static following treatment. Hence, treatment encompasses prophylaxis, therapy and/or cure. Prophylaxis refers to prevention of a potential disease and/or a prevention of worsening of symptoms or progression of a disease.

[0215] As used herein, a pharmaceutically effective agent includes any therapeutic agent or bioactive agent, including, but not limited to, for example, anesthetics, vasoconstrictors, dispersing agents, conventional therapeutic drugs, including small molecule drugs, and therapeutic proteins.

[0216] As used herein, treatment means any manner in which the symptoms of a condition, disorder or disease or other indication thereof is/are ameliorated or otherwise beneficially altered.

[0217] As used herein, therapeutic effect means an effect resulting from treatment of a subject that alters, typically improves or ameliorates, the symptoms of a disease or condition, or that cures a disease or condition. A therapeutically effective amount refers to the amount of a composition, molecule or compound which results in a therapeutic effect following administration to a subject. A therapeutically effective amount effects treatment.

[0218] As used herein, the term “subject” refers to an animal, including a mammal, such as a human being.

[0219] As used herein, a patient refers to a human subject.

[0220] As used herein, amelioration of the symptoms of a particular disease or disorder by a treatment, such as by administration of a pharmaceutical composition or other therapeutic, refers to any lessening, whether permanent or temporary, lasting or transient, of the symptoms that can be attributed to or associated with administration of the composition or therapeutic.

[0221] As used herein, prevention or prophylaxis refers to methods in which the risk of developing disease or condition is reduced.

[0222] As used herein, an effective amount is the quantity of a therapeutic agent necessary for preventing, curing, ameliorating, arresting or partially arresting a symptom of a disease or disorder.

[0223] As used herein, unit dose form refers to physically discrete units suitable for human and animal subjects and packaged individually as is known in the art.

[0224] As used herein, a single dosage formulation refers to a formulation for direct administration.

[0225] As used herein, an “article of manufacture” is a product that is made and sold. As used throughout this application, the term is intended to encompass modified MMPs contained in articles of packaging.

[0226] As used herein, fluid refers to any composition that can flow. Fluids thus encompass compositions that are in the form of semi-solids, pastes, solutions, aqueous mixtures, gels, lotions, creams and other such compositions.

[0227] As used herein, a cellular extract or lysate refers to a preparation or fraction which is made from a lysed or disrupted cell.

[0228] As used herein, animal includes any animal, such as, but not limited to, primates, including humans, gorillas and monkeys; rodents, such as mice and rats; fowl, such as chickens; ruminants, such as goats, cows, deer, sheep; ovine, such as pigs, and other animals. Non-human animals exclude humans as the contemplated animal. The enzymes provided herein are from any source, animal, plant, prokaryotic and fungal. Most enzymes are of animal origin, including mammalian origin.

[0229] As used herein, a control refers to a sample that is substantially identical to the test sample, except that it is not treated with a test parameter, or, if it is a plasma sample, it can be from a normal volunteer not affected with the condition of interest. A control also can be an internal control.

[0230] As used herein, the singular forms “a,” “an” and “the” include plural referents unless the context clearly dictates otherwise. Thus, for example, reference to a compound, comprising “an extracellular domain” includes compounds with one or a plurality of extracellular domains.

[0231] As used herein, ranges and amounts can be expressed as “about” a particular value or range. “About” also includes the exact amount. Hence “about 5 bases” means “about 5 bases” and also “5 bases.”

[0232] As used herein, “optional” or “optionally” means that the subsequently described event or circumstance does or does not occur, and that the description includes instances where said event or circumstance occurs and instances where it does not. For example, an optionally substituted group means that the group is unsubstituted or is substituted.

[0233] As used herein, the abbreviations for any protective groups, amino acids and other compounds are, unless indicated otherwise, in accord with their common usage, recognized abbreviations, or the IUPAC-IUB Commission on Biochemical Nomenclature (see e.g., Biochem. (1972) 11:1726).

### B. MATRIX METALLOPROTEINASES AND CALCIUM-DEPENDENT CONDITIONAL ACTIVITY

[0234] Provided herein are methods and uses for conditionally controlling the activity of modified matrix metalloproteinases (MMPs), such as matrix metalloproteinase-1 (MMP-1), by virtue of their dependence on calcium for activity. As described herein, the calcium-sensitive MMPs (csMMPs) used in the methods and uses herein are modified MMP polypeptides that exhibit substantially reduced activity at physiological levels of extracellular calcium (e.g., from about 1 mM to 1.3 mM) compared to the activity of the corresponding unmodified MMP not containing the modification(s). The csMMPs exhibit greater activity at higher concentrations of calcium than the same csMMP at physiologic calcium concentrations. Thus, in the methods herein, the csMMPs can be delivered to a subject in the presence of concentrations of calcium that are greater than the physiologic levels of calcium (e.g., greater than 2 mM), wherein the csMMPs are active. As the local concentration of calcium equilibrates to physiologic levels, the activity of the MMP is reduced, thereby achieving conditional or temporal activity of the enzyme.

[0235] Since csMMPs are MMPs that degrade proteins that are part of the extracellular matrix, such as collagen, the methods provided herein can be used to conditionally degrade one or more components of the extracellular matrix (ECM) by regulating calcium concentration in the local environment of a csMMP. For example, csMMP compositions formulated in the presence of concentrations of calcium greater than physiological levels of extracellular calcium, such as greater than 1 mM, and generally greater than 2 mM calcium (e.g., 2 mM to 100 mM, such as at least 5 mM or 10 mM), can be delivered to a subject to conditionally degrade one or more components of the extracellular matrix (ECM). In particular, provided herein are methods to treat ECM-mediated diseases or conditions, and in particular fibrotic diseases or conditions, in which a component of the ECM is involved in the etiology or progression of the disease or condition, such as cellulite, Dupuytren's syndrome and Peyronie's disease. For example, the methods provided herein are used to treat fibrotic diseases or conditions that are collagen-mediated diseases or conditions, for example, cellulite, by calcium-dependent temporal regulation of a csMMP.

[0236] 1. Matrix Metalloproteinase Activity in the Extracellular Matrix

[0237] Most MMPs are involved in degradation of the extracellular matrix (ECM). For example, many of these enzymes can cleave components of the basement membrane and extracellular matrix, such as collagen (e.g., collagen I) and other substrates (see e.g., Table 3). MMPs are involved in tissue remodeling, for example, in processes such as wound healing, pregnancy and angiogenesis. In addition, MMPs also can process a number of cell-surface cytokines, receptors and other soluble proteins. The proteolytic activity of MMPs acts as an effector mechanism of tissue remodeling in physiologic and pathologic conditions, and as a modulator of inflammation. The excess synthesis and production of MMPs leads to accelerated degradation of the ECM which is associated with a variety of diseases and conditions such as, for example, bone homeostasis, arthritis, cancer, multiple sclerosis and rheumatoid arthritis. In the context of neuroinflammatory diseases, MMPs have been implicated in processes such as (a) blood-brain barrier (BBB) and blood-nerve barrier opening, (b) invasion of neural tissue by blood-derived immune cells, (c) shedding of cytokines and cytokine receptors, and (d) direct cellular damage in diseases of the peripheral and central nervous system (Leppert et al. (2001) Brain Res. Rev. 36(2-3):249-257; Borkakoti et al. (1998) Prog. Biophys. Mol. Biol. 70(1):73-94). The enzymes are specifically regulated by endogenous inhibitors called tissue inhibitors of matrix metalloproteinases (TIMPs).

[0238] Table 3 sets forth exemplary MMPs, and also sets forth exemplary target substrates for each enzyme. Reference to such substrates is for reference and exemplification, and are not intended to represent an exhaustive list of all target substrates. One of skill in the art knows or can empirically determine ECM target substrates for a desired enzyme using routine assays, such as any described herein. The Table also sets forth the sequence identifiers (SEQ ID NOS) for the nucleotide sequence and encoded amino acid sequence of the precursor polypeptide for each of the exemplary proteases are listed in the Table. The sequence identifiers (SEQ ID NOS) for the amino acid sequence of the preproprotein and the zymogen-activated processed mature form of the protein (lacking the propeptide) also are listed in the Table. The location of domains also is indicated. Those of skill in the art are familiar with such domains and can identify them by virtue of structural and/or functional homology with other such domains. It is understood that polypeptides and the description of domains thereof are theoretically derived based on homology analysis and alignments with similar polypeptides. Thus, the exact locus can vary, and is not necessarily the same for each polypeptide. Variations of MMPs also exist among allelic and species variants and other variants known in the art, and such variants also are contemplated for modification as csMMPs as described herein below.

TABLE 3
Matrix Metalloproteinases

| | | | SEQ ID NO | | | |
|---|---|---|---|---|---|---|
| | | | | | Zymogen | Mature |
| | | GenBank | Precursor | | (pro form) | (processed |
| Protease | Substrate | No. | nt | aa | aa | form) |

Collagenases:

| | | | | | | |
|---|---|---|---|---|---|---|
| MMP-1 (interstitial | collagen I, II, III, VII, | P03956, | 4 | 1 | 2 | 5 |
| collagenase-1) | VIII, X, XI, gelatin, | NM_002421 | | (ss aa 1-19; | | |
| | proteoglycan, | | | pp aa 20-99) | | |
| | fibronectin, | | | | | |
| | glycoprotein | | | | | |
| MMP-8 (neutrophil | collagen I, II, III, | P22894 | 15 | 16 | 17 | 132 |
| collagenase; | aggrecan | NM_002424 | | (ss aa 1-20; | | |
| collagenase-2) | | | | pp aa 21-100) | | |
| MMP-13 | collagen I, II, III, IV, | P45452 | 18 | 19 | 20 | 133 |
| (collagenase -3) | VI, IX, X, XIV, | NM_002427 | | (ss aa 1-19; | | |
| | gelatin, proteoglycan, | | | pp aa 20-103) | | |
| | fibronectin, | | | | | |
| | glycoprotein | | | | | |
| MMP-18 | collagen I | Xenopus | 21 | 22 | 23 | 134 |
| (collagenase-4) | | laevis | | (ss aa 1-17; | | |
| | | O13065 | | pp aa 18-99) | | |

Gelatinases:

| | | | | | | |
|---|---|---|---|---|---|---|
| MMP-2 | gelatins, collagen I, | P08253 | 24 | 25 | 26 | 135 |
| (gelatinase A) | II, III, IV, V, VII, X, | NM_004530 | | (ss aa 1-29; | | |
| | XI, elastin, | | | pp 30-109) | | |
| | fibronectin, laminin, | | | | | |
| | proteoglycan, | | | | | |
| | glycoprotein | | | | | |
| MMP-9 | gelatin, collagen IV, | P14780 | 27 | 28 | 29 | 136 |
| (gelatinase B) | V, VI, XIV, elastin, | NM_004994 | | (ss aa 1-19; | | |
| | laminin, | | | pp aa 20-93) | | |
| | proteoglycan, | | | | | |
| | glycoprotein | | | | | |

Stromelysins:

| | | | | | | |
|---|---|---|---|---|---|---|
| MMP-3 | fibronectin, elastin, | P08254 | 30 | 31 | 32 | 137 |
| (stromelysin-1) | laminin, | NM_002422 | | (ss aa 1-17; | | |
| | gelatin, proteoglycan, | | | pp aa 18-99) | | |
| | glycoprotein, | | | | | |
| | collagen III, IV, V, | | | | | |
| | VII, IX, X, XI | | | | | |
| MMP-10 | collagen III, IV, V, | P09238 | 33 | 34 | 35 | 138 |
| (stromelysin-2) | elastin, gelatin, | NM_002425 | | (ss aa 1-17; | | |
| | fibronectin, aggrecan | | | pp aa 18-98) | | |
| MMP-11 | Gelatin, fibronectin, | P24347 | 36 | 37 | 38 | 139 |
| (stromelysin-3) | laminin, | X57766 | | (ss aa 1-31; | | |
| | collagen IV | | | pp aa 32-97) | | |

Matrilysins:

| | | | | | | |
|---|---|---|---|---|---|---|
| MMP-7 | fibronectin, laminin, | P09237 | 39 | 40 | 41 | 140 |
| (matrilysin) | elastin, gelatin, | NM_002423 | | (ss aa 1-17; | | |
| | collagen I, IV, | | | pp aa 18-94) | | |
| | proteoglycan, | | | | | |
| | glycoprotein | | | | | |
| MMP-26 | collagen IV, | Q9NRE1 | 42 | 43 | 44 | 141 |
| (matrilysin-2) | fibronectin, gelatin, | NM_021801 | | (ss aa 1-17; | | |
| | proteoglycan | | | pp aa 18-89) | | |

Metalloelastase:

| | | | | | | |
|---|---|---|---|---|---|---|
| MMP-12 | elastin, fibronectin, | P39900 | 45 | 46 | 47 | 142 |
| (metalloelastase) | laminin, collagen I, | NM_002426 | | (ss aa 1-16; | | |
| | IV, V, gelatin, | | | pp aa 17-105) | | |
| | proteoglycan, | | | | | |
| | glycoprotein | | | | | |

Membrane-type MMPs:

| | | | | | | |
|---|---|---|---|---|---|---|
| MMP-14 | Collagen I, II, III, | P50281 | 48 | 49 | 50 | 143 |
| (MT1-MMP) | gelatin, aggrecan, | NM_004995 | | (ss aa 1-20; | | |
| Transmembrane | fibronectin, laminin, | | | pp aa 21-111) | | |
| | proteoglycan, glycoprotein | | | | | |
| MMP-15 | aggrecan, fibronectin, | P51511 | 51 | 52 | 53 | 144 |
| (MT2-MMP) | laminin, glycoprotein | NM_002428 | | (ss aa 1-41; | | |
| Transmembrane | | | | pp aa 42-131) | | |
| MMP-16 | Collagen III, | P51512 | 54 | 55 | 56 | 145 |
| (MT3-MMP) | fibronectin, laminin, | NM_005941 | | (ss aa 1-31; | | |
| Transmembrane | gelatin, proteoglycan | | | pp aa 32-119) | | |
| MMP-17 | gelatin | Q9ULZ9 | 57 | 58 | 59 | 146 |
| (MT4-MMP) | | AB021225 | | (ss aa 1-38; | | |
| GPI anchor | | | | pp aa 39-128) | | |
| MMP-24 | fibronectin, gelatin, | Q9Y5R2 | 60 | 61 | 62 | 147 |
| (MT5-MMP) | proteoglycan | NM_006690 | | (ss aa 1-52; | | |
| Transmembrane | | | | pp aa 53-155) | | |
| MMP-25 | collagen IV, gelatin, | Q9NPA2 | 63 | 64 | 65 | 148 |
| (MT6-MMP) | fibronectin, | NM_022468 | | (ss aa 1-21; | | |
| GPI anchor | proteoglycan | | | pp aa 22-107) | | |

Enamelysin:

| | | | | | | |
|---|---|---|---|---|---|---|
| MMP-20 | aggrecan | O60882 | 66 | 67 | 68 | 149 |
| (enamelysin) | | Y12779 | | (ss aa 1-22; | | |
| | | | | pp aa 23-107) | | |

Other:

| | | | | | | |
|---|---|---|---|---|---|---|
| MMP-19 | collagen IV, gelatin, | Q99542 | 69 | 70 | 71 | 150 |
| | laminin, aggrecan, | NM_002429 | | (ss aa 1-18; | | |
| | fibronectin, | | | pp aa 19-97) | | |
| | glycoprotein | | | | | |
| MMP-21 | gelatin | Q8N119 | 72 | 73 | 74 | 151 |
| | | NM_147191 | | (ss aa 1-24; | | |
| | | | | pp aa 25-144) | | |
| MMP-23 | gelatin | O75900 | 75 | 76 | 76 | 152 |
| CA-MMP | | AJ005256 | | (pp aa 1-78) | | |
| MMP-27 | gelatin | Q9H306 | 78 | 79 | 80 | 153 |
| CMMP | | NM_022122 | | (ss aa 1-17; | | |
| | | | | pp aa 18-98) | | |
| MMP-28 | | Q9H239 | 81 | 82 | 83 | 154 |
| (epilysin) | | NM_024302 | | (ss aa 1-22; | | |
| | | | | pp aa 23-122) | | |

[0239] 2. Regulation of MMP Activity

[0240] Under normal physiological conditions, MMP activity can be regulated at various stages: during transcription, proteolytic processing (i.e., activation) of proenzyme forms (e.g., proMMP-1 (discussed below)), as well as by inhibition of enzyme activity by a specific or broad range of chemical inhibitors, or by endogenous inhibitors. In addition, the availability of metal ions, such as zinc and calcium, also can regulate MMP catalytic activity, for example by altering the tertiary structure and stability of the enzyme.

[0241] a. Metal Binding

[0242] The presence of metal ions is required for MMP catalytic activity. The catalytic domain of MMPs (further discussed below) binds two zinc ions and one to three calcium ions. One of the zinc ions is required for catalytic activity. The importance of zinc ions to MMP catalysis has been examined by metal replacement. For example, transition metals (e.g., CO²⁺, Mn²⁺, Cd²⁺ and Ni²⁺) can be used as substitutes for the catalytic zinc, resulting in retained, albeit reduced, protease activity, but altered substrate specificity (Cha et al. (1998) J. Biol. Inorg. Chem. 3:353-359).

[0243] MMP enzymes can contain multiple calcium binding sites in its catalytic domain, including high-affinity and low-affinity calcium binding sites. The dissociation constants for high-affinity binding regions are in the nanomolar range, whereas low-affinity dissociation constants are in the micromolar range. For example, MMP-26 requires the presence of at least 120 μM calcium for enzyme activity (Lee et al. (2007) Biochem. J. 403:31-42). Ca²⁺ binding of MMP-1 is cooperative, with a Hill coefficient of 2.9 and 50% saturation at 400 μM Ca²⁺ (Zhang et al. (1997) J. Biol. Chem. 272:1444-1447). The dependence of catalytic activity on Ca²⁺ concentration also is cooperative, with a Hill coefficient of 1.7-2.0 and a midpoint Ca²⁺ concentration of 0.2 μM (Zhang et al. (1997) J. Biol. Chem. 272:1444-1447).

[0244] The calcium dependence of the enzymatic activity is a result of the dependence of MMP tertiary structure on the presence of calcium. For example, calcium ions can modulate MMP catalytic activity through conformational changes in the active site (Lee et al. (2007) Biochem. J. 403:31-42; Zhang et al. (1997) J. Biol. Chem. 272:1444-1447). Insufficient calcium concentrations lead to interdomain conformational changes which lead to increased protein flexibility and decreased thermostability of MMPs (Ohvayashi et al. (2012) Appl. Environ. Microbiol. 78(16):5839-5844). In addition, MMP stability is regulated by Ca²⁺ binding, as the Ca²⁺-stabilized active conformation of MMPs is more resistant to denaturants and less susceptible to proteolysis (Lowry et al. (1992) Proteins Struc. Funct. Genet. 12:42-48; Housley et al. (1993) J. Biol. Chem. 268:4481-4487).

[0245] b. Endogenous Inhibitors

[0246] Endogenous inhibitors also regulate MMP activity. For example, exemplary of endogenous inhibitors are tissue inhibitors of metalloproteinases (TIMPs) (Nagase and Woessner (1999) J. Biol. Chem. 274(31):21491-21494; Vu and Werb (2000) Genes Dev. 14(17):2123-2133; Baker et al. (2002) J. Cell Science 115:3719-3727). Four TIMPs have been identified in vertebrates: TIMP-1, TIMP-2, TIMP-3, and TIMP-4. TIMPs (21 to 29 kDa) are secreted proteins that inhibit MMPs by binding the active site and chelating the active-site zinc (Visse and Nagase (2003) Circ. Res. 92:827-839). The expression of TIMPs is regulated during development and tissue remodeling.

[0247] In addition to TIMPs, proteins such as macroglobulin, thrombospondin-1 and thrombospondin-2 can inhibit MMP activity by forming complexes with MMPs and facilitating their removal from the extracellular environment (Baker et al. (2002) J. Cell Science 115:3719-3727). For example, α2-macroglobin, a 772 kDa protein, contains a cleavable ‘bait’ region that, once cleaved by a MMP (e.g., MMP-1), causes a conformational change that entraps the proteinase, which becomes covalently anchored by transacylation. The MMP-α2-macroglobin complex can then bind the low density lipoprotein receptor related protein (LDL-RP), which results in receptor-mediated endocytosis and degradation (Baker et al. (2002) J. Cell Sci. 115:3719-3727; Barrett (1981) Methods Enzymol. 80:77-754; Feldman et al. (1985) Biochem. 82:5700-5704).

[0248] 3. Role of Collagen in ECM Diseases and Conditions

[0249] Among the primary substrates of many MMPs is collagen, and in particular collagen I. Collagen is the main source of structural support for multicellular animals. The mechanical strength of collagen depends on a highly regulated mechanism of intermolecular crosslinking. Collagen is a major structural constituent of mammalian organisms and makes up a large portion of the total protein content of the skin and other parts of the animal body. However, collagen has been associated with the etiology or progression of various diseases or conditions. For example, numerous diseases and conditions are associated with excess collagen deposition due, for example, to erratic accumulation of fibrous tissue rich in collagen, or other causes. Certain diseases and conditions result from defects or changes in the architecture of the extracellular matrix due to aberrant expression or production of collagen. For example, in some inflammatory conditions, such as those that occur upon wound healing, cytokines are secreted, which stimulate fibroblasts to secrete collagen. The collagen can then accumulate as they are locally deposited, and the cross-linking of collagen molecules can result in a wide range of fibrotic conditions.

[0250] Collagen-mediated diseases or conditions (also referred to as fibrotic tissue disorders) are known to one of skill in the art (see e.g., published U.S. Application No. 2007/0224183; U.S. Pat. Nos. 6,353,028; 6,060,474; 6,566,331; 6,294,350). Excess collagen deposition is a feature in several chronic inflammatory diseases and in other diseases and conditions, including, but not limited to, fibrotic diseases or conditions resulting in scar formation, Dupuytren's syndrome, Peyronie's disease, Ledderhose fibrosis, adhesive capsulitis (e.g., frozen shoulder), stiff joints, scleroderma, localized scleroderma (e.g., sclerodactyly), lymphedema, interstitial cystitis (IC), telangiectasia, Barrett's metaplasia, pneumatosis cystoides intestinalis, collagenous colitis, ventricular hypertrophy (e.g., left ventricular hypertrophy (LVH), atherosclerosis, arterial stenosis, and scars, such as scars resulting from among surgical adhesions or keloids, hypertrophic scars and depressed scars. Excessive collagen deposition can produce unwanted binding and distortion of normal tissue architecture, leading to disfiguring conditions of the skin, such as wrinkling, cellulite formation and neoplastic fibrosis.

[0251] Several of the collagen-mediated diseases or conditions above are characterized by the presence of abundant fibrous septae of collagen, which are constructed from cross-linked collagen filaments (also called cords or cables), or collagen plaques. For example, cellulite is a prominent condition that is characterized by alterations in the connective tissue matrix resulting in an abnormal fibrous septae network of collagen in addition to adipogenicity (Rawlings et al. (2006) Int. J. Cos. Science 28:175-190).

[0252] Mechanical stability of collagen septae is established by intermolecular cross-linking between collagen strands to form fibrils. The tensile strength of the collagen fiber is related to the collagen crosslink type, concentration of crosslinks and the type of collagen. The stiffness (or toughness) of the tissue containing the collagen fiber(s) also is a function of the type of collagen in the fiber and crosslinking. Under healthy conditions, collagen septae serve to stiffen soft cellular tissue and also to provide structure by physically compartmentalizing the tissue, for example, to establish planes of ingress for small blood vessels. Changes in the distribution, quantity and relative proportions of collagens in these tissues can lead to formation of additional collagen septae, enlargement of present collagen septae, and/or formation of collagen plaques. These abnormal structures can lead to altered cell phenotypes, architectural distortion of the tissue with altered blood flow, impaired nutrient diffusion, and altered cell signaling (Wells, R. G., “Function and metabolism of collagen and other extracellular matrix proteins,” in The Textbook of Hepatology: from Basic Science to Clinical Practice. 3rd ed.; Rodés J, editor; Oxford: Blackwell Publishing; 2007).

[0253] 4. Conditional Regulation of MMP Activity by Calcium-Dependence

[0254] Diseases and conditions of the ECM that are characterized by aberrant expression or overproduction of one or more collagens or other ECM component, resulting in their accumulation and unwanted deposition, can be treated by enzymes that degrade collagen or other ECM component. For example, certain bacteria, such as Clostridium, produce collagenases. Bacterial collagenase (e.g., from clostridium histolyticum), is an enzyme active at neutral pH that degrades collagen, and has been clinically tested for multiple indications, including Dupuytren's contraction, Peyronie's Disease, frozen shoulder, cellulite, lipoma, and others. For example, bacterial collagenases have been used to treat collagen-mediated conditions such as cellulite (see e.g., US 2007/0224184); Dupuytren's syndrome (see e.g., U.S. Pat. Nos. RE39,941; 5,589,171; 6,086,872; 7,811,560); Peyronie's disease (see e.g., U.S. Pat. No. 6,022,539), and to promote wound healing (see e.g., U.S. Publication Nos. 2003/0170225, 2006/0222639 and 2008/0145357 and U.S. Pat. Nos. 6,074,664 and 7,641,900). It is approved for the treatment of Dupuytren's contracture in the United States (marketed as XIAFLEX®), Europe (marketed as XIAPEX®) and Canada. In particular, bacterial collagenase marketed as XIAFLEX® contains purified collagenase isolated and purified from the fermentation of Clostridium histolyticum bacteria and is made of two microbial collagenases: collagenase AUX-I and collagenase AUX-II.

[0255] Collagenase is capable of irreversibly cleaving collagens, for example, collagens of type I, II and III. Tissue destruction caused by these collagenases also has been linked to the pathogenesis of human diseases with which the collagenase-producing bacteria are associated (Harrington (1996) Infect Immun. 64(6):1885-1891). Accordingly, it is not unexpected that the prolonged and unregulated activity of collagenase can result in excessive collagen degradation, which can lead to side-effects due to undesirable tissue destruction, including prolonged or unwanted degradation of ligaments, scar tissue and tendon. Bacterial collagenases also differ from vertebrate collagenases in that they exhibit broader substrate specificity. Bacterial collagenase can degrade most collagen types, with multiple cleavages in triple helical regions. Unlike vertebrate collagenases, bacterial collagenases can degrade both native and denatured forms of collagen, and several also have the ability to effectively degrade type IV collagen which is known to contain regions of non-helical conformation (Mookhtiar and Van Wart (1992) Matrix Suppl. 1:116-126). Limited activity against type IV collagen, found in basement cell membranes, can account for bleeding side effects of underlying endothelium. Hence, administration of collagenase (e.g., bacterial collagenase) risks side effects associated with prolonged activity and limits the dosages that can be administered. For example, prolonged activation of administered collagenase can result in unwanted side effects, such as swelling, pain, bruising, pruritus, loss of tissue tensile properties, and substantial bleeding at sites of injection (Bedair et al. (2007) J. Appl. Physiol. 102:2338-2345; Hurst et al. (2009) New England Journal of Medicine 361:968-979; and U.S. Patent Publication No. 2010/0003237).

[0256] Because MMPs are inherently calcium-dependent endopeptidases, the activity of MMPs requires a minimum concentration of calcium for activity. It is found herein that MMPs can be modified to increase the minimum concentration of calcium required for activity. For example, modified MMP polypeptides are provided herein that exhibit an increase in sensitivity to calcium concentrations, for example, so that the MMP requires increased levels of calcium for catalytic activity. Increasing the calcium dependency of MMPs can achieve temporary enzyme activation, thereby regulating the duration of csMMP enzymatic action on extracellular matrix (ECM) components, and overcome the limitations and side effects of uncontrolled MMP activity.

[0257] In particular, since the physiological level of calcium in the ECM is less than 2 mM, it is found herein that select modified MMP polypeptides that exhibit calcium sensitive activity as a function of calcium concentration can be utilized to achieve temporal regulation of the MMP in physiologic environments. As described in the Examples and elsewhere herein, modified MMPs are identified that exhibit reduced activity at physiologic calcium levels (e.g., less than 2 mM), while exhibiting greater activity at higher concentrations of calcium (e.g., greater than 2 mM, such as at least 5 mM or at least 10 mM or greater). In contrast, unmodified MMPs, such as unmodified or wild-type MMP-1, exhibit substantially similar activity across a broad range of calcium concentrations, including substantial activity at physiologic levels of calcium. Thus, unlike wild-type MMP polypeptides, the activity of csMMP polypeptides can be temporally regulated by controlling local concentrations of calcium. This can avoid uncontrolled or prolonged degradation of collagen and other ECM components that can be associated with adverse side effects of treatment.

[0258] By virtue of the temporal activation of such enzymes upon in vivo administration, the treatment of such diseases and conditions is regulated to limit the enzymatic degradation of the matrix components. For example, by limiting the duration of action of matrix degradation, unwanted side effects associated with uncontrolled protein degradation are minimized. This is an advantage of the present method of treating an ECM-mediated disease or condition over existing collagenase treatments, because methods of treating diseases and/or conditions of the ECM using calcium sensitive MMPs can reduce deleterious side effects associated with unwanted prolonged activation of enzymes by regulating csMMP activity with local calcium levels.

[0259] For example, the methods of using the modified csMMP polypeptides provided herein that exhibit calcium sensitivity and are conditionally active, can be used to treat ECM-mediated diseases and disorders. For example, such csMMP polypeptides are active at calcium concentrations that are higher than the normal extracellular calcium concentrations in the ECM. Thus, when administered to the ECM in the presence of high calcium, the enzymes exhibit activity. In one example, before administration, a csMMP can be reconstituted in a buffer containing concentrations of calcium that are higher than normal extracellular physiological levels. The csMMP exhibits activity when exposed to high calcium concentrations (e.g., 10 mM Ca²⁺). As the calcium steadily diffuses, decreasing the calcium concentration local to the csMMPs, and approaching or reaching physiologic levels of extracellular calcium, the activity of the csMMP is reduced. Thus, the csMMP exhibits conditional activity, conditioned upon maintenance of an increased calcium concentration. For example, the activity of the csMMP can be controlled for a predetermined time by maintaining calcium concentrations in the ECM that are higher than the normal physiological calcium concentration.

[0260] The following sections describe in further detail the methods and uses provided herein of temporal or conditional activity of a MMP polypeptide by regulating local calcium. For example, described below are exemplary modified MMP polypeptides that are csMMPs and compositions thereof for use in the methods. Also described are exemplary collagen-mediated diseases and conditions that can be treated by any of the csMMP polypeptides provided herein. The description is exemplified based on csMMP-1 polypeptides, but as described herein, can be adapted by one of skill in the art based on the description herein for use of other csMMP polypeptides in the methods for treating any collagen-mediated disease or condition in which a substrate of the MMP is involved in the etiology or progression of disease.

### C. MATRIX METALLOPROTEINASES (MMPs): MMP-1 AND OTHER MMP COLLAGENASES

[0261] Matrix metalloproteinases (MMPs) are a family of zinc-dependent and calcium-dependent endopeptidases. There are over 25 MMPs known and they are grouped into different families depending on function, substrate specificity and/or sequence similarity. The families of MMPs include collagenases, gelatinases, stromelysins, matrilysins, metaloelastases, membrane-type MMPs, and enamelysins (see e.g., Table 4).

[0262] MMPs share similar structure made up of common domains. The basic structure of MMPs is made up of the following homologous domains: 1) a signal peptide which directs MMPs to the secretory or plasma membrane insertion pathway, which is removed in the endoplasmic reticulum to yield latent proenzymes (with the exception of MMP-23 which lacks the pro-domain and is secreted in its active form); 2) a pro-domain that confers latency to the enzymes by occupying the active site zinc, making the catalytic enzyme inaccessible to substrates; 3) a catalytic domain, containing a Zn²⁺ ion which is required for proteolytic activity; 4) one or more hemopexin (Hpx) domains which mediate interactions with substrates (and inhibitors, such as tissue inhibitors of metalloproteinases (TIMPs)) and confer specificity of the enzyme; and 5) a proline-rich, flexible hinge region of approximately 75 amino acids, which has no known structure and links the catalytic and the hemopexin domains. The domain organization of MMPs is summarized in Table 4 below.

[0263] MMP-7, -26, and -23 are exceptions to this basic domain structure (Table 4). MMP-7 and MMP-26 lack the hemopexin domain, yet display specificity in substrate degradation. MMP-23, also called cysteine array MMP, lacks a functional pro-domain and the hemopexin domain; instead, it has a cysteine-rich domain followed by an immunoglobulin-like domain and a type II transmembrane domain in the N-terminal part of the polypeptide.

[0264] Additional structural domains are characteristic of certain MMP subgroups. For example, the membrane-type MMPs contain an additional transmembrane domain and a small cytoplasmic domain (MMP-14, MMP-15, MMP-16, and MMP-24) or a glycosylphosphatidyl inositol linkage (MMP-17 and MMP-25), which anchors these proteins to the cell surface. MMP-2 and MMP-9 contain up to three tandem repeats of fibronectin type II modules that confer gelatin-binding properties to these enzymes.

TABLE 4
Domain structure of MMPs

| | signal | type II | pro- | | furin | | | | | type I | | | Cys | IgG- |
|---|---|---|---|---|---|---|---|---|---|---|---|---|---|---|
| | pep- | trans-mb | pep- | V | clvg | Cat | Fn | | Hpx | trans-mb | GPI | Cp | array | like |
| Class: MMP | tide | domain | tide | insert | site | domain | repeats | Hinge | domain | domain | anchor | domain | region | domain |
| Matrilysins | + | − | + | − | − | + | − | − | − | − | − | − | | − |
| MMP-7, -26 | | | | | | | | | | | | | | |
| Collagenases: | + | − | + | − | − | + | − | + | + | − | − | − | | − |
| MMP-1, -8, | | | | | | | | | | | | | | |
| -13, -18 | | | | | | | | | | | | | | |
| Stromelysins: | | | | | | | | | | | | | | |
| MMP-3, -10 | | | | | | | | | | | | | | |
| Other MMPs: | | | | | | | | | | | | | | |
| MMP-12, -19, | | | | | | | | | | | | | | |
| -20, -27 | | | | | | | | | | | | | | |
| Gelatinases: | + | − | + | − | − | + | + | + | + | − | − | − | | − |
| MMP-2, -9 | | | | | | | | | | | | | | |
| Other MMP: | + | − | + | + | + | + | − | + | + | − | − | − | | − |
| MMP-21 | | | | | | | | | | | | | | |
| Other MMPs: | + | − | + | − | + | + | − | + | + | − | − | − | | − |
| MMP-11, -28 | | | | | | | | | | | | | | |
| Membrane | + | − | + | − | + | + | − | + | + | + | − | + | | − |
| Type MMPs: | | | | | | | | | | | | | | |
| MMP-14, -15, | | | | | | | | | | | | | | |
| 16, -24 | | | | | | | | | | | | | | |
| Membrane | + | − | + | − | + | + | − | + | + | − | + | − | | − |
| Type MMPs: | | | | | | | | | | | | | | |
| MMP-17, -25 | | | | | | | | | | | | | | |
| Other MMP: | + | + | − | − | + | + | − | − | − | − | − | − | + | + |
| MMP-23 | | | | | | | | | | | | | | |

Abbreviations:
V = vitronectin
Cat = catalytic
Fn = fibronectin
Hpx = hemopexin
Cp = cytoplasmic

[0265] MMPs (with the exception of MMP-23) are synthesized and secreted as latent zymogens. Zymogen activation prevents unwanted protein degradation that could occur if proteases were always present in active form. The propeptide of zymogen forms of MMPs ranges in size from about 80-100 residues in length and serves to stabilize the zymogen form and also to prevent catalytic activity of the MMP enzyme.

[0266] The propeptide of MMP zymogens forms a globular structure containing a three helix fold that is stabilized by hydrophobic interactions and hydrogen bonds (Morgunova et al. (1999) Science. 284:1667-1670). The highly conserved motif, PRCxxPD (SEQ ID NO:84), is located in the C-terminal portion of the propeptide and contains a cysteine residue, which confers latency to the proenzyme. The sulfhydryl group of the cysteine residue coordinates with the catalytic Zn²⁺ ion, bound in the active site of the enzyme (discussed further below), sterically blocking the active site of the protease and preventing access of substrates to the catalytic center (Van Wart et al. (1990) Proc. Natl. Acad. Sci U.S.A. 87:5578-5582; Nagase and Woessner (1999) 1 Biol. Chem. 274:21491-21494; Birkedal-Hansen (1995) Curr. Opin. Cell Biol. 7:728-735). The loop between the second and third helices of the propeptide assists in stabilizing the zymogen form by shielding the catalytic cleft with its hydrophobic side-chains, thereby preventing access of solvent molecules that could disrupt the activity-inhibiting cysteine-Zn²⁺ interaction.

[0267] The loop between the first and second helices, the residues of which vary between MMPs, provide a “bait region” that is cleaved by activating proteases (e.g., trypsin or other MMPs). Proteases also can cleave loops, between the second and third helices. Upon cleavage of one or both of these loop regions by activating proteases, the propeptide structure is disrupted, and the shielding of the catalytic cleft is withdrawn, allowing water to enter and hydrolyze the cysteine-Zn²⁺ coordination, leading to activation via a “cysteine-switch” mechanism (Van Wart and Birkedal-Hansen (1990) Proc. Natl. Acad. Sci. U.S.A. 87:5578-5582). Final processing, to completely remove the propeptide, typically involves autoproteolytic cleavage by the target MMP. Activation of MMPs also can be entirely autocatalytic, for example, following interruption of the cysteine to zinc coordination effected by exposure of the enzyme to sulfhydryl-reacting compounds (exemplary reactive compounds are set forth in Section E.4).

[0268] As discussed above, activation of MMP zymogens requires processing, which generally involves removal of the propeptide (e.g., positions 1-80 of SEQ ID NO:2) and/or conformational changes of the enzyme to generate a processed mature form. Processing of the enzyme by removal of the propeptide is required for activity of MMPs. For normal MMPs (e.g., wild-type) that are not conditionally active as are those used in the methods provided herein, the processed mature form is an active enzyme. Thus, it is understood that wild-type MMPs in their processed mature form are enzymatically active, and thus for these enzymes this is the active form. csMMPs provided herein, however, additionally require the presence of sufficient calcium to be fully active.

[0269] 1. Matrix Metalloproteinase-1 (MMP-1)

[0270] MMP-1, also called interstitial collagenase, is a member of the MMP family. Like the other MMPs, the structure of MMP-1 is maintained by binding several Zn²⁺ and Ca²⁺ ions and requires a Zn²⁺ ion bound in the active site for catalytic activity. MMP-1 is expressed by several types of cells, including fibroblasts, and participates in the degradation of ECM components following secretion into the interstitial space. Degradation of the ECM is an important step in tissue remodeling, for example, in processes such as embryogenesis, tissue repair and remodeling, angiogenesis, organ morphogenesis and wound healing.

[0271] MMP-1 is encoded by a nucleic acid molecule set forth in SEQ ID NO:4, resulting in a preproenzyme (SEQ ID NO:1), which is cotranslationally processed to remove a signal peptide to generate an inactive precursor, known as a zymogen or proenzyme (proMMP-1; SEQ ID NO:2). The secreted MMP-1 zymogen is a multidomain enzyme that contains a prodomain of 80 amino acids (corresponding to amino acid residues 1-80 of SEQ ID NO:2), a catalytic domain of 162 amino acids (corresponding to amino acid residues 81-242 of the sequence of amino acids set forth in SEQ ID NO:2), a 16-residue linker (corresponding to amino acid residues 243-258 of the sequence of amino acids set forth in SEQ ID NO:2), and a hemopexin (Hpx) domain of 189 amino acid residues (corresponding to amino acid residues 259-450 of the sequence of amino acids set forth in SEQ ID NO:2) (Jozic et al. (2005) J. Biol. Chem. 280(10):9578-9785). Upon processing, as described above, the propeptide is removed, resulting in a processed mature form having a sequence of amino acids set forth in SEQ ID NO:5.

[0272] As noted above, MMP-1 cleaves collagen type I and collagen type III, which are the most abundant proteins of the skin. These collagen types are associated with many of the conditions of the ECM as described herein in Section B.2. In contrast, collagen type IV is a major component of the basal lamina of blood vessels. Hence, targeting of type IV collagen, for example, can lead to leaky blood vessels, which can be a side effect of treatments that are meant to target the extracellular matrix as described herein if the treatment does not selectively target collagens of type I or III. For example, bacterial collagenase, which has been used as treatment for cellulite, can induce hemorrhages through cleavage of type IV collagen in addition to type I and/or type III collagen (see e.g., Vargaftig et al. (2005) Inflammation Res. 6:627-635). Thus, an advantage of the use of MMP-1, and in particular csMMP-1 that can be conditionally and temporally controlled, is that it does not cleave type IV collagen when used as a therapeutic agent to treat conditions of the ECM.

[0273] a. Catalytic Domain

[0274] The catalytic domain of MMP-1 is similar in structure to other MMPs and has a shallow active site cleft that separates a smaller “lower subdomain” and a larger “upper subdomain.” The catalytic domain encompasses a characteristic five-stranded, highly twisted beta-sheet, flanked by three surface loops on its convex side and two alpha-helices on its concave side, followed by a third alpha helix following the specificity loop (Maskos, K. (2005) Biochimie. 87:240-263). Integral to the structure of MMP-1 is the binding of two Zn²⁺ ions and three Ca²⁺ ions. Zn²⁺- and Ca²⁺-binding residues within the catalytic domain are highly conserved among MMP family members (Maskos, K. (2005) Biochimie. 87:240-263).

[0275] i. Zn²⁺ Ions

[0276] Like other matrix metalloproteinases (MMPs), MMP-1 contains a Zn²⁺ ion at the active center of the enzyme that is required for catalytic activity. This “catalytic zinc” is bound to the conserved MMP zinc binding motif, HExGHxxGxxH (SEQ ID NO:85; corresponding to amino acid residues 199-209 of SEQ ID NO:2), in the active site, which is followed by a methionine turn which also is conserved among MMPs (Bode et al. (1993) FEBS Lett. 331:134-140). The imidazole side-chains of the histidine residues within the zinc binding motif at the active site of MMP-1 are ligands to the Zn²⁺. During catalysis, the catalytic Zn²⁺ promotes nucleophilic attack on the carbonyl carbon by the oxygen atom of a water molecule at the active site. An active-site base (a glutamate residue in carboxypeptidases) facilitates this reaction by extracting a proton from the attacking water molecule. Thus, the glutamate (E) residue (amino acid 200 of SEQ ID NO:2) activates a zinc-bound H₂O molecule, thereby providing the nucleophile that cleaves peptide bonds. Mutation of any one of the histidines, within the zinc binding motif, ablates MMP-1 catalytic activity.

[0277] In addition to the catalytic zinc MMP-1 possesses a second “structural zinc” ion. Three histidine residues, corresponding to amino acid residues 149, 164, and 177 of SEQ ID NO:2, and a glutamate residue, corresponding to amino acid residue 151 of SEQ ID NO:2, form a tetrahedral coordination sphere to bind the second zinc, which confers stability to the tertiary structure of MMP-1.

[0278] ii. Ca²⁺ Ions

[0279] In addition to interactions with zinc ions, the structure of the catalytic domain of MMP-1 also is maintained by the binding of three Ca²⁺ ions. One Ca²⁺ molecule also binds to the Hpx-like domain. While calcium does not directly participate in proteolysis, the binding of calcium molecules plays an important role in the stabilization of the tertiary structure of the enzyme, thereby regulating catalytic activity (Seltzer et al. (1976) Arch. Biochem. Biophys. 173:355-361; Housley et al. (1993) J. Biol. Chem. 268:4481-4487). In the absence of calcium, MMP-1, for example, is catalytically inactive and adopts a partially unfolded state with native secondary structure but altered tertiary structure (Zhang et al. (1997) J. Biol. Chem. 272:1444-1447).

[0280] The Ca²⁺-binding sites are characterized as being highly conserved Glu- and Asp-rich regions. On either side of the structural zinc binding motif, MMP-1 contains two calcium binding sites. Asp156, Gly157, Gly159, N161, Asp179 and Glu182, of SEQ ID NO:2, are involved in binding the first calcium ion which is probably the most tightly bound calcium ion. This calcium packs the S-shaped loop, between the third and fourth strands of the twisted beta sheet, against the side-chain carboxylate groups of the fifth strand of the beta sheet.

[0281] The second calcium ion is located between the loop between the fourth and fifth strands, and the third strand of the twisted beta sheet. This calcium ion is coordinated in an octahedral manner by the carbonyl groups of residues Asp139, Gly171 and Gly173 and the carboxylate oxygen of Asp175, and a water molecule.

[0282] The loop following the fifth strand of the twisted beta sheet encircles a third calcium ion, which is held by the carbonyl groups of Glu180 and Glu182 together with the carboxylate oxygen of Asp105 and Glu180 and two water molecules in a pentagonal bipyramid.

[0283] MMP-1 binding of these three calcium ions is important for the maintenance of the tertiary, but not secondary, structure of the enzyme (Zhang et al. (1997) J. Biol. Chem. 272:144-1447). The tertiary structure of MMP-1 is important, in particular active MMP-1, for catalytic activity, thermal stability, and resistance to denaturants and proteolysis (Housley et al. (1993) J. Biol. Chem. 268: 4481-4487; Lee et al. (2007) Biochem. J. 403:31-42; Lowry et al. (1992) Proteins Struc. Funct. Genet. 12:42-48; Ohvayashi et al. (2012) Appl. Environ. Microbiol. 78(16):5839-5844; Zhang et al. (1997) J. Biol. Chem. 272:144-1447).

[0284] b. Linker Region and Hemopexin-Like Domain

[0285] The linker, or hinge region, of MMP-1 is a flexible, proline-rich segment of 16 amino acid residues that links the catalytic domain with the hemopexin (Hpx)-like domain, corresponding to amino acid residues 243-258 of the sequence of amino acids set forth in SEQ ID NO:2. This region is important for the stability of MMP-1 and is involved in the degradation of complex substrates, such as fibrillar collagen, which requires concerted action of the catalytic and hemopexin domains (Chung et al. (2004) EMBO J. 23:3020-3030; Overall, C. (2002) Mol. Biotechnol. 22:51-86). The hinge region also may contribute to collagen binding and unwinding activities of MMP-1 (Tam et al. (2004) J. Biol. Chem. 279:43336-43344).

[0286] MMP-1 also contains a hemopexin (Hpx)-like C-terminal domain, containing 189 amino acid residues (corresponding to amino acid residues 259-450 of the sequence of amino acids set forth in SEQ ID NO:2), that functions in protein-protein interactions and is important for substrate recognition and interactions with inhibitors, in particular tissue inhibitors of metalloproteinases (TIMPs). The Hpx-like domain is important for the processing of collagen (Murphy et al. (1992) J. Biol. Chem. 267:9612-9618). Other protein-protein interactions mediated by the hemopexin domain are important for enzyme activation, localization, internalization, and degradation (Nagase (1997) Biol. Chem. 378:151-160).

[0287] c. MMP-1 Substrates

[0288] As an endopeptidase, MMP-1 is capable of cleaving several ECM-related substrates, including structural and non-structural components of the ECM and components of the basement membrane, as set forth in Table 3 (Hagemann et al. (2012) World J. Clin. Oncol. 3(5):67-79). In particular, MMP-1 cleaves interstitial fibrillar collagen. Collagens are the major structural proteins of connective tissues such as skin, tendon, ligament, bone, cartilage, blood vessels and basement membranes. Collagen is composed of a triple helix, which generally consists of two identical chains (α1) and an additional chain that differs slightly in its chemical composition (α2). Interstitial collagens I, II and III are the most abundant collagens, and they provide the scaffolding of the tissue and guide cells to migrate, proliferate and differentiate. Collagen degradation is integral to several biological processes such as embryogenesis, tissue repair and remodeling, angiogenesis, organ morphogenesis and wound healing. MMP-1 binds collagen molecules, locally unwinds the triple helical structure, and hydrolyzes collagen peptide bonds, e.g., at the Gly775-Ile776 or Gly775-Leu776 peptide bonds of the α1 and α2 chains of collagen I, resulting in a three-quarter length N-terminal fragment and a one-quarter length C-terminal fragment. The collagen fragments are unstable at body temperature and undergo denaturation into gelatin, rendering them susceptible to further digestion by other non-specific tissue proteinases.

[0289] Degradation of collagen fibrils is not the only result of MMP-1 cleavage of collagen, as the collagen fragments have been linked to other biological functions, such as controlling cellular behavior during tissue remodeling. For example, collagen cleavage products have been implicated in activation and recruitment of osteoclasts during bone remodeling (Zhao et al. (1999) J. Clin. Invest. 103:517-524), epithelial cell migration during wound healing (Pilcher et al. (1997) J. Cell Biol. 137:1445-1457) and apoptosis of amniotic fibroblasts before the onset of labor (Lei et al. (1996) J. Clin. Invest. 98:1971-1978). However, aberrant collagen cleavage is associated with progression of diseases such as arthritis, cancer, atherosclerosis, aneurysm and fibrosis (Woessner (1998) in Matrix Metalloproteinases, Parks W. C. and Mecham, R. P. (eds), pp 1-14; Brinckerhoff and Matrisian, (2002) Nat. Rev. Mol. Cell. Biol. 3:207-214).

[0290] MMP-1 collagenolytic activity is essentially mediated through the (183)RWTNNFREY(191) motif (SEQ ID NO:86) of the catalytic domain in concert with the C-terminal hemopexin domain (Chung et al. (2000) J. Biol. Chem. 275(38):29610-29617). Active MMP-1 hydrolyzes type I collagen into N-terminal and C-terminal fragments. However, it hydrolyzes type III collagen 10-fold faster than type I collagen (Wilhelm et al. (1984) Coll. Relat. Res. 4(2):129-152). MMP-1 also cleaves α-chains of native type II collagen (Fields et al. (1987) J. Biol. Chem. 262:6221-6226), type VII collagen (Seltzer et al. (1989) J. Biol. Chem. 264:3822-3826), type X collagen (Schmid et al. (1986) J. Biol. Chem. 261:4184-4189), type VIII (Gadher et al. (1989) Matrix 9:109-115), α2-macroglubulin (Sottrup-Jensen and Birkedal-Hansen (1989) J. Biol. Chem. 264:393-401), gelatin and casein (Fields et al. (1990) Biochem. 29:6670-6677), α1-proteinase inhibitor and α1-antichymotrypsin (Desrochers et al. (1991) J. Clin. Invest. 87:2258-2265), tenascin (Imai et al. (1994) FEBS Lett. 352:216-218) and IL-1β (Ito et al. (1996) J. Biol. Chem. 271:14657-14660).

[0291] 2. Other Collagenases

[0292] Collagenase activity also can be conferred by MMPs other than MMP-1. While several MMPs have the capability of degrading collagen, MMP-8, MMP-13 and MMP-18, in particular, are categorized as collagenases based on their preference for collagen as a substrate. Bacterial collagenase also degrades collagen. As there are multiple forms of collagen, collagenases vary with respect to their collagen-substrate specificities. Collagenases also differ in expression patterns.

[0293] MMP-8, also called Neutrophil Collagenase, is naturally expressed in exclusively inflammatory conditions. While MMP-1 degrades type III collagen more efficiently than type I or type II collagen, MMP-8 preferentially degrades type I collagen over type III or type II collagen. MMP-8 is highly expressed in the postpartum uterus, and it is thought to be involved in the postpartum involution of the uterus. MMP-8 also is the predominant collagenase expressed in ulcers and healing wounds. A sequence alignment of MMP-1 and MMP-8 is set forth in FIG. 2A.

[0294] MMP-13, also called Collagenase-3, is expressed in the skeleton during embryonic development. MMP-13 preferentially cleaves type II collagen, and is thus involved in the turnover of connective tissue. A sequence alignment of MMP-1 and MMP-13 is set forth in FIG. 2B.

[0295] MMP-18, also called Collagenase-4, is found in Xenopus laevis and degrades type I collagen. MMP-18 is expressed in metamorphosing tadpoles and its expression is localized to the tail during tail resorption. MMP-18 also may play a role in hind limb morphogenesis and digestive tract remodeling. A sequence alignment of MMP-1 and MMP-18 is set forth in FIG. 2C.

### D. CALCIUM-SENSITIVE MODIFIED MATRIX METALLOPROTEASE POLYPEPTIDES (csMMP)

[0296] Provided herein are methods that utilize modified MMP polypeptides or catalytically active fragments thereof, such as modified MMP-1 polypeptides or catalytically active fragments thereof, that exhibit calcium-sensitive activity in the presence of high calcium concentrations greater than physiological levels, and decreased activity in the presence of physiological levels of calcium. Such modified MMP polypeptides or catalytically active fragments thereof are also referred to herein as calcium-sensitive MMP (csMMP) polypeptides. Hence, the csMMPs can degrade one or more components of the ECM, in particular a collagen (e.g., type I or type III) in a calcium-dependent manner, whereby the modified MMP polypeptide is conditionally active in the presence of calcium concentrations greater than present in a physiological environment and activity decreases upon exposure to physiological conditions.

[0297] Accordingly, the activity of such modified MMPs can be modulated by the concentration of calcium, rendering them therapeutic molecules whose activity can be controlled in vivo for therapeutic applications such as fibrotic diseases. By virtue of the ability to degrade a component of the ECM, and in particular a collagen, the csMMPs are used in methods herein to treat fibrotic diseases or other conditions that are associated with accumulated or unwanted presence of a component of the ECM (e.g., a collagen). The csMMP, however, are active for only a limited time upon administration to a subject, such as administration to the ECM of a subject, thereby avoiding prolonged degradation of components of the extracellular matrix, which is a problem with other collagenase treatments. Thus, the activation of the csMMPs, for example upon administration to the body, can be temporally and conditionally controlled by virtue of changes in calcium concentrations in the local environment of the csMMPs. For example, the activation of the enzyme is temporally controlled by administering the csMMPs in the presence of high calcium, and as the calcium diffuses through the tissue (or is absorbed or taken up by nearby cells) in vivo, the extracellular calcium concentration returns to physiological levels (approximately 1-1.3 mM Ca²⁺), which results in reduced activity or inactivation of the csMMP.

[0298] In particular, the csMMPs provided herein are active at high concentrations of calcium greater than physiological levels, such as greater than 1.5 mM, such as from or from about 1.5 mM to 100 mM, 2 mM to 50 mM, 2 mM to 25 mM, 5 mM to 50 mM, 5 mM to 25 mM, 5 mM to 15 mM or 8 mM to 12 mM, for example at least or about 1.5 mM, 2.0 mM, 2.5 mM, 3.0 mM, 3.5 mM, 4.0 mM, 4.5 mM, 5.0 mM, 5.5 mM, 6.0 mM, 6.5 mM, 7.0 mM, 7.5 mM, 8.0 mM, 8.5, mM, 9.0 mM, 9.5 mM, 10.0 mM, 11 mM, 12 mM, 13 mM, 14 mM, 15 mM, 16 mM, 17 mM, 18 mM, 19 mM or 20 mM, and generally at least or about 10 mM. Compared to the activity at the high calcium concentrations greater than physiological levels, the csMMPs exhibit reduced activity at physiological levels of calcium of from or from about 1-1.3 mM Ca²⁺. Thus, the csMMPs used in the methods herein are less active or inactive in the presence of physiological levels of calcium than at higher calcium concentrations. For example, the csMMPs exhibits less than 90%, 85%, 80%, 75%, 70%, 65%, 60%, 55%, 50%, 45%, 40%, 35%, 30%, 25%, 20%, 15%, 10%, 5%, 2% or less matrix metalloprotease activity in the presence of physiological levels of extracellular calcium compared to its activity in the presence of calcium greater than the physiological level. The activity of the csMMP in the presence of physiological levels of calcium is generally at least 0.5-fold, 1-fold, 1.5-fold, 2-fold, 2.5-fold, 3-fold, 4-fold, 5-fold, 6-fold, 7-fold, 8-fold, 9-fold, 10-fold, 11-fold, 12-fold, 13-fold, 14-fold, 15-fold, or 20-fold less than the activity in the presence of levels of calcium greater than the physiological level. For example, the csMMPs used in the methods provided herein, have a ratio of activity at high calcium concentrations greater than the physiological level (e.g., 10 mM Ca²⁺) compared to physiological levels of calcium (e.g., 1-1.3 mM Ca²⁺) that is or is about 1.1, 1.2, 1.3, 1.4, 1.5, 1.6, 1.7, 1.8, 1.9, 2.0, 2.5, 3.0, 3.5, 4.0, 4.5, 5, 5.5, 6, 6.5, 7, 7.5, 8, 8.5, 9, 9.5, 10, 15, 20, 30, 40, 50 or more.

[0299] The modified MMP polypeptides used in the methods provided herein are generated by introducing modifications to a starting, unmodified reference MMP polypeptide (e.g., MMP-1). The unmodified MMP polypeptide is one that cleaves a component of the ECM, such as any of the MMP polypeptides set forth in Table 3. In particular, the unmodified MMP polypeptide is one that degrades or cleaves a collagen, such as a matrix metalloprotease-1 (MMP-1), matrix metalloprotease-2 (MMP-2), matrix metalloprotease-3 (MMP-3), matrix-metalloprotease-7 (MMP-7), matrix metalloprotease-8 (MMP-8), matrix metalloprotease-9 (MMP-9), matrix metalloprotease-10 (MMP-10), matrix metalloprotease-11 (MMP-11), matrix-metalloprotease-12 (MMP-12), matrix metalloprotease-13 (MMP-13), matrix metalloprotease-14 (MMP-14), matrix metalloprotease-16 (MMP-16), matrix metalloprotease-18 (MMP-18), matrix metalloprotease-19 (MMP-19), matrix metalloprotease-25 (MMP-25), and matrix metalloprotease-26 (MMP-26), or a catalytically active fragment thereof. For example, the collagen can be a collagen type I, collagen type II, collagen type III, collagen type IV, collagen type VI, collagen type VII, collagen type VIII, collagen type IX, collagen type X, collagen type XI and collagen type XIV. In one example, the unmodified MMP polypeptide is one that degrades or cleaves a collagen type I, such as a MMP-1, MMP-2, MMP-7, MMP-8, MMP-12, MMP-13, MMP-14 and MMP-18, or catalytically active fragment thereof. In another example, the unmodified MMP polypeptide is one that degrades or cleaves a collagen type III, such as a MMP-1, MMP-2, MMP-3, MMP-8, MMP-10, MMP-13, MMP-14 and MMP-16. In a further example, the unmodified MMP polypeptide is one that degrades or cleaves collagen type I and collagen type III, such as a MMP-1, MMP-2, MMP-8, MMP-13 and MMP-14. In a particular example, the unmodified MMP polypeptide is a MMP-1 polypeptide.

[0300] The modification can be an amino acid replacement or substitution, addition, or deletion of amino acids, or any combination thereof. For example, modified MMP-1 polypeptides used in the methods provided herein include those with 1, 2, 3, 4, 5, 6, 7, 8, 9, 10, 11, 12, 13, 14, 15, 16, 17, 18, 19, 20 or more modified positions. Also used in the methods provided herein are modified MMP-1 polypeptides with two or more modifications compared to a starting reference MMP-1 polypeptide. Modified MMP-1 polypeptides include those with 2, 3, 4, 5, 6, 7, 8, 9, 10, 11, 12, 13, 14, 15, 16, 17, 18, 19, 20 or more modified positions. In particular, modified csMMP polypeptides, used in the methods provided herein, contain 1, 2, 3, 4, 5, 6, 7, 8, 9 or 10 amino acid modifications. In some examples, modified MMP-1 polypeptides contain only a single modification. In other examples, modified MMP-1 polypeptides contain two, three, four, five or six modifications. In additional examples, any modification(s) provided herein can be combined with any other modification known to one of skill in the art so long as the resulting modified MMP-1 polypeptide retains increased calcium dependency for enzymatic activity when it is in its processed mature form.

[0301] The modifications provided herein can be made by standard recombinant DNA techniques such as are routine to one of skill in the art. Any method known in the art to effect mutation of any one or more amino acids in a target protein can be employed. Methods include standard site-directed mutagenesis (using e.g., a kit, such as QuikChange, available from Stratagene) of encoding nucleic acid molecules, or solid phase polypeptide synthesis methods.

[0302] For purposes herein, reference to positions and amino acids for modification, including amino acid replacement or replacements, described herein, are with reference to the human MMP-1 polypeptide set forth in SEQ ID NO:2. Corresponding positions in another MMP polypeptide, or another form of a MMP polypeptide (e.g., mature form) can be identified by alignment of the MMP polypeptide with the reference MMP-1 polypeptide set forth in SEQ ID NO:2. For example, FIGS. 2 and 3 depict alignments of exemplary MMP polypeptides with SEQ ID NO:2, and identification of exemplary corresponding positions. FIG. 4 depicts alignment of the zymogen form set forth in SEQ ID NO:2 and the mature form thereof, lacking the prodomain, set forth in SEQ ID NO:5, and identification of exemplary corresponding positions. For purposes of modification (e.g., amino acid replacement), the corresponding amino acid residue can be any amino acid residue, and need not be identical to the residue set forth in SEQ ID NO:2. The corresponding amino acid residue identified by alignment with residues in SEQ ID NO:2 can be an amino acid residue that is identical to SEQ ID NO:2, or is a conservative or semi-conservative amino acid residue thereto (see e.g., FIGS. 2A-2C and 3A-3C). It also is understood that the exemplary replacements provided herein can be made at the corresponding residue in any MMP polypeptide, so long as the replacement results in a MMP polypeptide that exhibits dependency on increased calcium concentrations for activity. Based on this description and the description elsewhere herein, it is within the level of one of skill in the art to generate a modified MMP polypeptide containing any one or more of the described mutations and test the modified polypeptide for increased calcium sensitivity (i.e., increased calcium dependency for activity) as described herein.

[0303] For example, any of the modifications described herein with reference to SEQ ID NO:2 can be made in another MMP polypeptide by identifying the corresponding amino acid residue in another MMP polypeptide, such as any set forth in SEQ ID NOS:17, 20, 23, 26, 29, 32, 35, 38, 41, 44, 47, 50, 53, 56, 59, 62, 65, 68, 71, 74, 76, 80, 83, or mature or catalytically active form thereof or variants of any of such forms, such as those that exhibit at least 60%, 70%, 75%, 80%, 85%, 86%, 87%, 88%, 89%, 90%, 91%, 92%, 93%, 94%, 95%, 96%, 97%, 98%, 99% or more sequence identity to any of SEQ ID NOS:17, 20, 23, 26, 29, 32, 35, 38, 41, 44, 47, 50, 53, 56, 59, 62, 65, 68, 71, 74, 76, 80, and 83. For example, the modifications can be made in a mature or active form of any of the above polypeptides, such as any MMP polypeptide set forth in any of SEQ ID NOS:5, 132, 133, 134, 135, 137, 138, 140, 143 or 145 or a catalytically active fragment thereof, or any form or variant thereof that has a sequence of amino acids that exhibits at least 70%, 75%, 80%, 85%, 86%, 87%, 88%, 89%, 90%, 91%, 92%, 93%, 94%, 95%, 96%, 97%, 98%, 99% or more sequence identity to any of SEQ ID NOS:5, 132, 133, 134, 135, 137, 138, 140, 143 or 145 or a catalytically active fragment thereof, so long as the modified MMP exhibits increased activity at levels of calcium greater than physiological levels than at physiological concentrations of calcium.

[0304] Modifications in a MMP polypeptide, for example a MMP-1 polypeptide, can be made to any form of a MMP polypeptide, including inactive (e.g., zymogen) or processed mature forms (active form), catalytically active fragments, allelic and species variants, splice variants, variants known in the art, or hybrid or chimeric MMP-1 polypeptides. Such forms of MMP are set forth in Table 3 above. For example, modifications can be made in a mature or active form of a MMP polypeptide, such as any MMP polypeptide set forth in any of SEQ ID NOS:5, 132, 133, 134, 135, 137, 138, 140, 143 or 145 or a catalytically active fragment thereof, or any form or variant thereof that has a sequence of amino acids that exhibits at least 70%, 75%, 80%, 85%, 86%, 87%, 88%, 89%, 90%, 91%, 92%, 93%, 94%, 95%, 96%, 97%, 98%, 99% or more sequence identity to any of SEQ ID NOS:5, 132, 133, 134, 135, 137, 138, 140, 143 or 145 or a catalytically active fragment thereof, so long as the modified MMP exhibits increased activity at levels of calcium greater than physiological levels than at physiological concentrations of calcium.

[0305] With reference to MMP-1, modifications can be made in a precursor MMP-1 polypeptide set forth in SEQ ID NO:1, an inactive pro-enzyme MMP-1 containing the propeptide (zymogen form) set forth in SEQ ID NO:2, a mature MMP-1 polypeptide lacking the propeptide set forth in SEQ ID NO:5, or any variant (e.g., species, allelic or modified variant) or active fragment thereof that has 40%, 50%, 60%, 70%, 80%, 90%, 91%, 92%, 93%, 94%, 95%, 96%, 97%, 98%, or 99% sequence identity to any of the MMP-1 polypeptides set forth in SEQ ID NOS:1, 2 or 5, so long as the modified MMP polypeptide retains increased calcium dependency for enzymatic activity. Allelic variants and other variants of MMP-1 polypeptides include, but are not limited to, any MMP-1 polypeptide containing any one or more amino acid variants set forth in SEQ ID NOS:6-8 and 87. Exemplary species variants for modification herein include, but are not limited to, pig, rabbit, bovine, horse, rat, and mouse, for example, those set forth in any of SEQ ID NOS:9-14. Modifications also can be in a MMP-1 polypeptide lacking one or more domains, as long as the MMP-1 polypeptide retains increased calcium dependency for enzymatic activity. For example, modifications can be in a MMP-1 polypeptide that includes only the catalytic domain (corresponding to amino acids 81-242 of the proenzyme MMP-1 polypeptide set forth in SEQ ID NO:2). Modifications also can be made in a MMP-1 polypeptide lacking all or a portion of the proline rich linker (corresponding to amino acids 243-258 of the proenzyme MMP-1 polypeptide set forth in SEQ ID NO:2) and/or lacking all or a portion of the hemopexin binding domain (corresponding to amino acids 259-450 of the proenzyme MMP-1 polypeptide set forth in SEQ ID NO:2).

[0306] It is understood that while modifications can be made with reference to any form of a MMP polypeptide, for purposes of the methods herein, the modified MMP is administered in an active form that exhibits matrix metalloprotease activity to cleave a component of the ECM. Such form generally is a mature enzyme form lacking the prodomain, such as a processed form of a zymogen, or can be a catalytically active fragment thereof. For example, activity of MMP polypeptides is typically exhibited in its processed mature form following cleavage of the propeptide and/or intermolecular and intramolecular processing of the enzyme to remove the propeptide (see e.g., Visse et al. (2003) Cir. Res. 92:827-839). Hence, any modified polypeptide provided herein that is a zymogen proenzyme can be activated by a processing agent to generate a processed mature MMP-1 polypeptide. As noted elsewhere herein, csMMPs provided herein also require calcium concentrations above or greater than physiological levels (e.g., 1-1.3 mM) to be fully active. The modified MMP or catalytically active fragment thereof exhibits at least 5%, 10%, 15%, 20%, 25%, 30%, 40%, 50%, 60%, 70%, 80%, 90%, 95%, 100%, 110%, 120%, 130%, 140%, 150%, 160%, 170%, 180%, 190%, 200%, 250%, 300%, 350%, 400%, 450%, or 500% or more of the activity of the unmodified MMP not containing the modification(s) (e.g., amino acid replacement(s)) when present at concentrations of calcium greater than physiological levels of calcium.

[0307] Modified MMP-1 polypeptides provided herein can be assayed for enzymatic activity under various conditions (e.g., at high and low levels of calcium) to identify those that confer increased calcium dependency for enzymatic activity. For example, MMP polypeptides that are normally active at physiological calcium concentrations (e.g., 1 mM Ca²⁺) and at high calcium concentrations (e.g., 10 mM Ca²⁺) are modified and enzymes are selected that are substantially active at calcium concentrations higher than physiological extracellular calcium concentrations (e.g., more than 1 mM Ca²⁺; such as at least or about at least 2 mM, 3 mM, 4 mM, 5 mM, 6 mM, 7 mM, 8 mM, 9 mM, 10 mM, 15 mM, 20 mM, 25 mM, 50 mM, 100 mM or greater than 100 mM), but that are less active or inactive at physiological calcium concentrations. Such modified enzymes can be used as conditionally active matrix-degrading enzymes where the condition for activity is high calcium (e.g., more than 1 mM Ca²⁺).

[0308] Exemplary modifications in a MMP polypeptide, for example a MMP-1 polypeptide, with reference to positions corresponding to positions in SEQ ID NO:2 are provided below. In the subsections below, non-limiting examples of modified MMP polypeptides that exhibit calcium-sensitive activity in the presence of high calcium concentrations greater than physiological levels and decreased activity in the presence of physiological levels of calcium, and encoding nucleic acid molecules, are described.

[0309] 1. Modifications at or Near a Metal Binding Site

[0310] Among the modified csMMP polypeptides provided herein for use in the methods herein are csMMP polypeptides containing one or more amino acid modifications in a starting, unmodified MMP, at amino acids at or near a metal binding site. Typically, the modification is an amino acid replacement. In particular, the modification, such as amino acid replacement or replacements, can be at or near (i.e., within 3 residues of) any one or more positions corresponding to any of the residues directly involved with zinc or calcium coordination. As described above, MMP proteins contain an active site zinc that is coordinated by imidazole side-chains of histidine residues at positions corresponding to positions 199, 203, and 209 with reference to positions set forth in SEQ ID NO:2. A second zinc ion is coordinated by histidine residues corresponding to positions 149, 164 and 177 with reference to SEQ ID NO:2. Binding of zinc to MMP serves as a stabilizing and/or structural function of the molecule. In addition to zinc, three calcium molecules bind to the catalytic domain and one to the hemopexin domain, which are coordinated by amino acids enriched in acidic side chains at positions corresponding to positions 156, 157, 159, 161, 179 and 182 (first calcium, C1); 139, 171, 173 and 175 (second calcium, C2); 105, 180 and 182 (third calcium, C3); and 266, 310, 359 and 408 (fourth calcium, C4), each with reference to positions set forth in SEQ ID NO:2. The calcium molecules have also been shown to play an important role in domain stabilization and in the regulation of catalytic activity. The amino acids important for the binding of the zinc and calcium molecules, and in particular those within the catalytic domain, are highly conserved among MMP family members (Maskos et al. (2005) Biochimie 87:249-263).

[0311] For wild-type or unmodified MMP polypeptides, Ca²⁺ ions are known to be required for the activity of MMPs (Nagai et al. (1966) Biochem. 5:3123-3130); Jeffrey et al. (1970) Biochem. 9:268-273). Sufficient activity, however, is achieved at physiological concentrations of calcium of 1 mM with higher concentrations of calcium not further increasing activity. While Ca²⁺ ions do not directly participate in proteolysis, it is integral in the stabilization of the tertiary structure of the enzyme. For example, circular dichroism analysis of human MMP-1 revealed that in the absence of calcium, the protein is in a catalytically inactive and partially unfolded state with a native secondary structure, but altered tertiary structure. Over time, in the absence of calcium, the enzymatic loss is irreversible, and in the case of MMP-3, results in autocatalysis.

[0312] It is found herein that modification at or near residues associated with metal binding, and in particular residues involved in calcium coordination, effect destabilization and degradation of the protein in the presence of physiological levels of calcium (e.g., about 1 mM Ca²⁺), but not in the presence of higher concentrations of calcium greater than the physiological level. This effect is especially evident at physiological temperatures (e.g., about or 37° C.). This negative effect on protein stability correlates to a reduction or abolishment of activity to digest substrate, such as collagen (e.g., collagen type I), under conditions that exist in the physiological environment (e.g., 1 mM Ca²⁺, 37° C.). Hence, the results show that the activity of such modified MMP polypeptides can be modulated under physiological conditions in vivo by calcium concentration, where activity is achieved at concentrations of calcium greater than physiological levels, but is reduced at levels of calcium present in the physiological environment (e.g., about 1 mM). This is in contrast to wild-type or unmodified MMPs that are normally active at physiological concentrations of calcium, and whose activity is not further modulated by higher concentrations of calcium.

[0313] In such examples of the above modified MMP polypeptides having a modification at or near a metal binding site, the amino acid replacement or replacements can be at any one or more positions corresponding to any of the following positions: 102, 103, 104, 105, 106, 107, 108, 136, 137, 138, 139, 140, 141, 142, 146, 147, 148, 149, 150, 151, 152, 153, 154, 155, 156, 157, 158, 159, 160, 161, 162, 163, 164, 165, 166, 167, 168, 169, 170, 171, 172, 173, 174, 175, 176, 177, 178, 179, 180, 181, 182, 183, 184, 185, 196, 197, 198, 199, 201, 202, 203, 204, 205, 206, 207, 208, 209, 210, 211, 212, 263, 264, 265, 266, 267, 268, 269, 307, 308, 309, 310, 311, 312, 313, 356, 357, 358, 359, 360, 361, 362, 405, 406, 407, 408, 409, 410, 411 with reference to positions set forth in SEQ ID NO:2. For example, the amino acid positions can be replacements at one or more positions corresponding to tyrosine (Y) 102, T103, P104, D105, L106, P107, R108, G136, Q137, A138, D139, I140, M141, I142, R146, G147, D148, H149, R150, D151, N152, S153, P154, F155, D156, G157, P158, G159, G160, N161, L162, A163, H164, A165, F166, Q167, P168, G169, P170, G171, I172, G173, G174, D175, A176, H177, F178, D179, E180, D181, E182, R183, W184, T185, V196, A197, A198, H199, L201, G202, H203, S204, L205, G206, L207, S208, H209, S210, T211, D212, L263, T264, F265, D266, A267, I268, T269, N307, G308, L309, E310, A311, A312, Y313, K356, H357, I358, D359, A360, A361, L362, H405, K406, V407, D408, A409, V410, F411, with reference to amino acid positions set forth in SEQ ID NO:2.

[0314] In any of the above provided modified MMP polypeptides that have an amino acid replacement at a position that is at or near a metal binding site, the amino acid replacement can be to any other amino acid so long as the resulting modified MMP polypeptide exhibits calcium sensitivity at concentrations of calcium greater than the physiological concentration, and reduced activity at physiological concentrations of calcium. For example, amino acid replacements include replacement of amino acids to an acidic (D or E); basic (H, K or R); neutral (C, N, Q, T, Y, S, G) or hydrophobic (F, M, W, I, V, L A, P) amino acid residue. For example, amino acid replacements at the noted positions include replacement by amino acid residues E, H, R, C, Q, T, S, G, M, W, I, V, L, A, P, N, F, D, Y or K.

[0315] For example, exemplary of such modified MMPs provided herein, such as a modified MMP-1 polypeptide, are those that contain at least one amino acid replacement from among replacement with: R at a position corresponding to position 102; K at a position corresponding to position 102; V at a position corresponding to position 102; M at a position corresponding to position 102; P at a position corresponding to position 102; N at a position corresponding to position 102; G at a position corresponding to position 102; L at a position corresponding to position 102; D at a position corresponding to position 102; S at a position corresponding to position 102; F at a position corresponding to position 102; A at a position corresponding to position 102; E at a position corresponding to position 102; Q at a position corresponding to position 102; C at a position corresponding to position 102; N at position corresponding to position 103; E at a position corresponding to position 104; T at a position corresponding to position 104; R at a position corresponding to position 104; D at a position corresponding to position 104; Q at a position corresponding to position 104; V at a position corresponding to position 104; Y at a position corresponding to position 104; H at a position corresponding to position 104; L at a position corresponding to position 104; A at a position corresponding to position 104; M at a position corresponding to position 104; A at a position corresponding to position 105; C at a position corresponding to position 105; F at a position corresponding to position 105; G at a position corresponding to position 105; I at a position corresponding to position 105; L at a position corresponding to position 105; M at a position corresponding to position 105; N at a position corresponding to position 105; P at a position corresponding to position 105; R at a position corresponding to position 105; S at a position corresponding to position 105; T at a position corresponding to position 105; V at a position corresponding to position 105; W at a position corresponding to position 105; E at a position corresponding to position 105; M at a position corresponding to position 106; A at a position corresponding to position 106; Y at a position corresponding to position 106; V at a position corresponding to position 106; I at a position corresponding to position 106; L at a position corresponding to position 107; T at a position corresponding to position 107; S at a position corresponding to position 107; R at a position corresponding to position 107; M at a position corresponding to position 107; V at a position corresponding to position 107; D at a position corresponding to position 107; A at a position corresponding to position 107; K at a position corresponding to position 107; G at a position corresponding to position 107; P at a position corresponding to position 108; G at a position corresponding to position 108; E at a position corresponding to position 108; A at a position corresponding to position 108; Y at a position corresponding to position 108; K at a position corresponding to position 108; C at a position corresponding to position 108; S at a position corresponding to position 108; S at a position corresponding to position 108; F at a position corresponding to position 108; I at a position corresponding to position 108; L at a position corresponding to position 108; N at a position corresponding to position 108; D at a position corresponding to position 136; M at a position corresponding to position 136; N at a position corresponding to position 136; A at a position corresponding to position 136; L at a position corresponding to position 136; P at a position corresponding to position 136; T at a position corresponding to position 136; R at a position corresponding to position 136; S at a position corresponding to position 136; H at a position corresponding to position 136; E at a position corresponding to position 136; A at a position corresponding to position 137; R at a position corresponding to position 137; G at a position corresponding to position 137; K at a position corresponding to position 137; H at a position corresponding to position 137; P at a position corresponding to position 137; S at a position corresponding to position 137; L at a position corresponding to position 137; W at a position corresponding to position 137; F at a position corresponding to position 137; T at a position corresponding to position 137; Y at a position corresponding to position 137; E at a position corresponding to position 137; G at a position corresponding to position 138; R at a position corresponding to position 139; V at a position corresponding to position 139; M at a position corresponding to position 139; C at a position corresponding to position 139; P at a position corresponding to position 139; P at a position corresponding to position 139; S at a position corresponding to position 139; L at a position corresponding to position 139; I at a position corresponding to position 139; H at a position corresponding to position 139; A at a position corresponding to position 139; G at a position corresponding to position 139; F at a position corresponding to position 139; N at a position corresponding to position 139; W at a position corresponding to position 139; Y at a position corresponding to position 139; E at a position corresponding to position 139; E at a position corresponding to position 141; I at a position corresponding to position 141; R at a position corresponding to position 141; S at a position corresponding to position 141; L at a position corresponding to position 141; A at a position corresponding to position 141; D at a position corresponding to position 141; W at a position corresponding to position 141; H at a position corresponding to position 141; N at a position corresponding to position 141; L at a position corresponding to position 142; M at a position corresponding to position 142; V at a position corresponding to position 142; T at a position corresponding to position 146; N at a position corresponding to position 146; Q at a position corresponding to position 146; K at a position corresponding to position 146; S at a position corresponding to position 146; D at a position corresponding to position 146; A at a position corresponding to position 146; Y at a position corresponding to position 146; V at a position corresponding to position 146; R at a position corresponding to position 147; F at a position corresponding to position 147; H at a position corresponding to position 147; W at a position corresponding to position 147; T at a position corresponding to position 147; C at a position corresponding to position 147; S at a position corresponding to position 147; V at a position corresponding to position 147; Q at a position corresponding to position 147; M at a position corresponding to position 147; R at a position corresponding to position 148; R at a position corresponding to position 148; I at a position corresponding to position 148; T at a position corresponding to position 148; G at a position corresponding to position 148; G at a position corresponding to position 148; V at a position corresponding to position 148; A at a position corresponding to position 148; A at a position corresponding to position 148; W at a position corresponding to position 148; P at a position corresponding to position 148; S at a position corresponding to position 148; N at a position corresponding to position 148; S at a position corresponding to position 150; E at a position corresponding to position 150; G at a position corresponding to position 150; M at a position corresponding to position 150; M at a position corresponding to position 150; T at a position corresponding to position 150; W at a position corresponding to position 150; A at a position corresponding to position 150; N at a position corresponding to position 150; K at a position corresponding to position 150; L at a position corresponding to position 150; L at a position corresponding to position 150; V at a position corresponding to position 150; D at a position corresponding to position 150; H at a position corresponding to position 150; G at a position corresponding to position 152; C at a position corresponding to position 152; F at a position corresponding to position 152; L at a position corresponding to position 152; L at a position corresponding to position 152; L at a position corresponding to position 152; P at a position corresponding to position 152; R at a position corresponding to position 152; H at a position corresponding to position 152; T at a position corresponding to position 152; Y at a position corresponding to position 152; K at a position corresponding to position 152; D at a position corresponding to position 152; W at a position corresponding to position 152; I at a position corresponding to position 152; A at a position corresponding to position 152; S at a position corresponding to position 152; R at a position corresponding to position 152; G at a position corresponding to position 153; H at a position corresponding to position 153; V at a position corresponding to position 153; T at a position corresponding to position 153; P at a position corresponding to position 153; F at a position corresponding to position 153; D at a position corresponding to position 153; Q at a position corresponding to position 153; Y at a position corresponding to position 153; L at a position corresponding to position 154; C at a position corresponding to position 154; S at a position corresponding to position 154; I at a position corresponding to position 154; M at a position corresponding to position 155; H at a position corresponding to position 156; L at a position corresponding to position 156; E at a position corresponding to position 156; A at a position corresponding to position 156; W at a position corresponding to position 156; C at a position corresponding to position 156; P at a position corresponding to position 156; P at a position corresponding to position 156; V at a position corresponding to position 156; V at a position corresponding to position 156; K at a position corresponding to position 156; S at a position corresponding to position 156; G at a position corresponding to position 156; T at a position corresponding to position 156; Y at a position corresponding to position 156; R at a position corresponding to position 156; M at a position corresponding to position 156; K at a position corresponding to position 157; D at a position corresponding to position 157; F at a position corresponding to position 157; R at a position corresponding to position 157; H at a position corresponding to position 157; L at a position corresponding to position 157; N at a position corresponding to position 157; N at a position corresponding to position 157; Y at a position corresponding to position 157; S at a position corresponding to position 157; T at a position corresponding to position 157; A at a position corresponding to position 157; A at a position corresponding to position 157; Q at a position corresponding to position 157; P at a position corresponding to position 157; P at a position corresponding to position 157; V at a position corresponding to position 157; V at a position corresponding to position 157; M at a position corresponding to position 157; S at a position corresponding to position 158; Y at a position corresponding to position 158; R at a position corresponding to position 158; L at a position corresponding to position 158; V at a position corresponding to position 158; V at a position corresponding to position 158; C at a position corresponding to position 158; A at a position corresponding to position 158; W at a position corresponding to position 158; I at a position corresponding to position 158; F at a position corresponding to position 158; Q at a position corresponding to position 158; T at a position corresponding to position 158; G at a position corresponding to position 158; K at a position corresponding to position 158; N at a position corresponding to position 158; D at a position corresponding to position 158; R at a position corresponding to position 159; S at a position corresponding to position 159; Q at a position corresponding to position 159; P at a position corresponding to position 159; V at a position corresponding to position 159; K at a position corresponding to position 159; A at a position corresponding to position 159; Y at a position corresponding to position 159; E at a position corresponding to position 159; T at a position corresponding to position 159; M at a position corresponding to position 159; I at a position corresponding to position 159; W at a position corresponding to position 159; W at a position corresponding to position 159; L at a position corresponding to position 159; C at a position corresponding to position 159; A at a position corresponding to position 160; H at a position corresponding to position 160; N at a position corresponding to position 160; W at a position corresponding to position 160; R at a position corresponding to position 160; M at a position corresponding to position 160; Q at a position corresponding to position 160; V at a position corresponding to position 160; S at a position corresponding to position 160; E at a position corresponding to position 160; L at a position corresponding to position 160; T at a position corresponding to position 160; S at a position corresponding to position 161; C at a position corresponding to position 161; L at a position corresponding to position 161; R at a position corresponding to position 161; R at a position corresponding to position 161; G at a position corresponding to position G; W at a position corresponding to position 161; Y at a position corresponding to position 161; E at a position corresponding to position 161; P at a position corresponding to position 161; T at a position corresponding to position 161; H at a position corresponding to position 161; I at a position corresponding to position 161; V at a position corresponding to position 161; F at a position corresponding to position 161; Q at a position corresponding to position 161; S at a position corresponding to position 164; W at a position corresponding to position 166; D at a position corresponding to position 167; R at a position corresponding to position 167; A at a position corresponding to position 167; S at a position corresponding to position 167; S at a position corresponding to position 167; F at a position corresponding to position 167; Y at a position corresponding to position 167; P at a position corresponding to position 167; T at a position corresponding to position 167; V at a position corresponding to position 167; L at a position corresponding to position 167; M at a position corresponding to position 167; N at a position corresponding to position 167; G at a position corresponding to position 167; K at a position corresponding to position 167; E at a position corresponding to position 167; R at a position corresponding to position 168; L at a position corresponding to position 170; R at a position corresponding to position 170; R at a position corresponding to position 170; I at a position corresponding to position 170; T at a position corresponding to position 170; Q at a position corresponding to position 170; G at a position corresponding to position 170; S at a position corresponding to position 170; H at a position corresponding to position 170; M at a position corresponding to position 170; K at a position corresponding to position 170; S at a position corresponding to position 171; M at a position corresponding to position 171; N at a position corresponding to position 171; P at a position corresponding to position 171; R at a position corresponding to position 171; Y at a position corresponding to position 171; A at a position corresponding to position 171; Q at a position corresponding to position 171; H at a position corresponding to position 171; L at a position corresponding to position 171; W at a position corresponding to position 171; C at a position corresponding to position 171; K at a position corresponding to position 171; E at a position corresponding to position 171; D at a position corresponding to position 171; Y at a position corresponding to position 172; T at a position corresponding to position 172; P at a position corresponding to position 172; A at a position corresponding to position 172; L at a position corresponding to position 172; Q at a position corresponding to position 172; E at a position corresponding to position 172; M at a position corresponding to position 172; D at a position corresponding to position 172; V at a position corresponding to position 172; R at a position corresponding to position 172; W at a position corresponding to position 172; N at a position corresponding to position 172; C at a position corresponding to position 173; L at a position corresponding to position 173; K at a position corresponding to position 173; W at a position corresponding to position 173; W at a position corresponding to position 173; S at a position corresponding to position 173; A at a position corresponding to position 173; R at a position corresponding to position 173; N at a position corresponding to position 173; T at a position corresponding to position 173; D at a position corresponding to position 173; V at a position corresponding to position 173; F at a position corresponding to position 173; M at a position corresponding to position 173; Y at a position corresponding to position 173; P at a position corresponding to position 173; I at a position corresponding to position 175; T at a position corresponding to position 175; N at a position corresponding to position 175; V at a position corresponding to position 175; S at a position corresponding to position 175; R at a position corresponding to position 175; G at a position corresponding to position 175; A at a position corresponding to position 175; F at a position corresponding to position 175; C at a position corresponding to position 175; Q at a position corresponding to position 175; Y at a position corresponding to position 175; L at a position corresponding to position 175; H at a position corresponding to position 175; P at a position corresponding to position 175; E at a position corresponding to position 175; F at a position corresponding to position 176; Q at a position corresponding to position 176; V at a position corresponding to position 176; T at a position corresponding to position 176; C at a position corresponding to position 176; L at a position corresponding to position 176; P at a position corresponding to position 179; L at a position corresponding to position 179; E at a position corresponding to position 179; G at a position corresponding to position 179; G at a position corresponding to position 179; S at a position corresponding to position 179; A at a position corresponding to position 179; K at a position corresponding to position 179; T at a position corresponding to position 179; I at a position corresponding to position 179; R at a position corresponding to position 179; N at a position corresponding to position 179; W at a position corresponding to position 179; Q at a position corresponding to position 179; V at a position corresponding to position 179; C at a position corresponding to position 179; M at a position corresponding to position 180; P at a position corresponding to position 180; K at a position corresponding to position 180; Y at a position corresponding to position 180; Q at a position corresponding to position 180; R at a position corresponding to position 180; A at a position corresponding to position 180; T at a position corresponding to positionl 80; I at a position corresponding to position 180; F at a position corresponding to position 180; C at a position corresponding to position 180; G at a position corresponding to position 180; S at a position corresponding to position 180; N at a position corresponding to position 180; D at a position corresponding to position 180; S at a position corresponding to position 181; Q at a position corresponding to position 181; A at a position corresponding to position 181; T at a position corresponding to position 181; E at a position corresponding to position 181; C at a position corresponding to position 182; P at a position corresponding to position 182; P at a position corresponding to position 182; S at a position corresponding to position 182; T at a position corresponding to position 182; R at a position corresponding to position 182; D at a position corresponding to position 182; A at a position corresponding to position 182; F at a position corresponding to position 182; L at a position corresponding to position 182; I at a position corresponding to position 182; Y at a position corresponding to position 182; Q at a position corresponding to position 182; W at a position corresponding to position 182; M at a position corresponding to position 182; G at a position corresponding to position 182; K at a position corresponding to position 183; W at a position corresponding to position 183; W at a position corresponding to position 183; E at a position corresponding to position 183; A at a position corresponding to position 183; T at a position corresponding to position 183; N at a position corresponding to position 183; H at a position corresponding to position 183; V at a position corresponding to position 183; C at a position corresponding to position 183; M at a position corresponding to position 183; G at a position corresponding to position 183; S at a position corresponding to position 183; S at a position corresponding to position 185; C at a position corresponding to position 197; V at a position corresponding to position 201; M at a position corresponding to position 201; E at a position corresponding to position 203; A at a position corresponding to position 204; M at a position corresponding to position 205; I at a position corresponding to position 205; A at a position corresponding to position 207; M at a position corresponding to position 207; D at a position corresponding to position 208; V at a position corresponding to position 208; P at a position corresponding to position 208; G at a position corresponding to position 208; A at a position corresponding to position 208; K at a position corresponding to position 208; N at a position corresponding to position 208; F at a position corresponding to position 208; Q at a position corresponding to position 208; W at a position corresponding to position 208; T at a position corresponding to position 208; E at a position corresponding to position 208; C at a position corresponding to position 208; R at a position corresponding to position 208; L at a position corresponding to position 208; T at a position corresponding to position 210; P at a position corresponding to position 211; R at a position corresponding to position 211; K at a position corresponding to position 211; G at a position corresponding to position 211; M at a position corresponding to position 211; M at a position corresponding to position 211; N at a position corresponding to position 211; N at a position corresponding to position 211; V at a position corresponding to position 211; Q at a position corresponding to position 211; S at a position corresponding to position 211; A at a position corresponding to position 211; E at a position corresponding to position 212; T at a position corresponding to position 212; N at a position corresponding to position 212; S at a position corresponding to position 212; P at a position corresponding to position 212; Q at a position corresponding to position 212; F at a position corresponding to position 212; H at a position corresponding to position 212; and Y at a position corresponding to position 212, with reference to amino acid positions set forth in SEQ ID NO:2.

[0316] As described above, it is understood that the replacements can be made in a corresponding position in another MMP polypeptide as determined by alignment therewith with the sequence set forth in SEQ ID NO:2 (see e.g., FIGS. 2A-2C and 3A-3C), whereby the corresponding position is the aligned position. For example, any of the above modifications (e.g., amino acid replacements) can be made at a corresponding position of a MMP polypeptide, such as any set forth in SEQ ID NOS:17, 20, 23, 26, 29, 32, 35, 38, 41, 44, 47, 50, 53, 56, 59, 62, 65, 68, 71, 74, 76, 80, 83, or mature or catalytically active form thereof or variants of any of such forms, such as those that exhibit at least 60%, 70%, 75%, 80%, 85%, 86%, 87%, 88%, 89%, 90%, 91%, 92%, 93%, 94%, 95%, 96%, 97%, 98%, 99% or more sequence identity to any of SEQ ID NOS:17, 20, 23, 26, 29, 32, 35, 38, 41, 44, 47, 50, 53, 56, 59, 62, 65, 68, 71, 74, 76, 80, 83. For example, the modifications (e.g., amino acid replacements) can be made in a mature or catalytically active form of any of the above polypeptides, such as any MMP polypeptide set forth in any of SEQ ID NOS:5, 132, 133, 134, 135, 137, 138, 140, 143 or 145 or a catalytically active fragment thereof, or any form or variant thereof that has a sequence of amino acids that exhibits at least 70%, 75%, 80%, 85%, 86%, 87%, 88%, 89%, 90%, 91%, 92%, 93%, 94%, 95%, 96%, 97%, 98%, 99% or more sequence identity to any of SEQ ID NOS:5, 132, 133, 134, 135, 137, 138, 140, 143 or 145 or a catalytically active fragment thereof, so long as the modified MMP exhibits increased activity at a calcium concentration greater than physiological levels compared to activity at physiological concentrations of calcium. As described above, it is within the level of the skilled artisan to determine corresponding positions by alignment of a MMP polypeptide with reference to MMP-1 zymogen form set forth in SEQ ID NO:2. For example, Table 5 sets forth the amino acid positions at or near a metal binding site in a mature MMP-1 polypeptide lacking the propeptide that correspond to the above positions with reference to MMP-1 set forth in SEQ ID NO:2 (see also FIG. 4).

[0317] In particular, modifications herein, such as any of the above amino acid replacements, are made in a MMP-1 polypeptide, such as in a precursor MMP-1 polypeptide set forth in SEQ ID NO:1, an inactive pro-enzyme MMP-1 containing the propeptide (zymogen form) set forth in SEQ ID NO:2, a mature MMP-1 polypeptide lacking the propeptide set forth in SEQ ID NO:5, or any variant (e.g., species, allelic or modified variant) or active fragment thereof that has 40%, 50%, 60%, 70%, 80%, 90%, 91%, 92%, 93%, 94%, 95%, 96%, 97%, 98%, or 99% sequence identity to any of the MMP-1 polypeptides set forth in SEQ ID NOS:1, 2 or 5, so long as the modified MMP polypeptide retains increased calcium dependency for enzymatic activity. In particular examples herein, modifications, such as amino acid replacements, for use in the methods herein are at positions at or near a metal binding site in a mature MMP-1 polypeptide set forth in SEQ ID NO:5, or a catalytically active fragment thereof or polypeptide that exhibits at least 40%, 50%, 60%, 70%, 80%, 90%, 91%, 92%, 93%, 94%, 95%, 96%, 97%, 98%, or 99% sequence identity to SEQ ID NO:5, so long as the modified MMP polypeptide retains increased calcium dependency for enzymatic activity.

TABLE 5
Residues At Or Near a Metal-Binding Site

| Corresponding | Position | Position | |
|---|---|---|---|
| hMMP-1 | (zymogen numbering; | (mature numbering; | Metal |
| Residue | SEQ ID NO: 2) | SEQ ID NO: 5) | Binding |
| Y | 102 | 22 | near Ca²⁺ |
| T | 103 | 23 | near Ca²⁺ |
| P | 104 | 24 | near Ca²⁺ |
| D | 105 | 25 | Ca²⁺ |
| L | 106 | 26 | near Ca²⁺ |
| P | 107 | 27 | near Ca²⁺ |
| R | 108 | 28 | near Ca²⁺ |
| G | 136 | 56 | near Ca²⁺ |
| Q | 137 | 57 | near Ca²⁺ |
| A | 138 | 58 | near Ca²⁺ |
| D | 139 | 59 | Ca²⁺ |
| I | 140 | 60 | near Ca²⁺ |
| M | 141 | 61 | near Ca²⁺ |
| I | 142 | 62 | near Ca²⁺ |
| R | 146 | 66 | near Zn²⁺ |
| G | 147 | 67 | near Zn²⁺ |
| D | 148 | 68 | near Zn²⁺ |
| H | 149 | 69 | Zn²⁺ |
| R | 150 | 70 | near Zn²⁺ |
| D | 151 | 71 | Zn²⁺ |
| N | 152 | 72 | near Zn²⁺ |
| S | 153 | 73 | near Ca²⁺ |
| P | 154 | 74 | near Ca²⁺ |
| F | 155 | 75 | near Ca²⁺ |
| D | 156 | 76 | Ca²⁺ |
| G | 157 | 77 | Ca²⁺ |
| P | 158 | 78 | near Ca²⁺ |
| G | 159 | 79 | Ca²⁺ |
| G | 160 | 80 | near Ca²⁺ |
| N | 161 | 81 | Ca²⁺ |
| L | 162 | 82 | near Ca²⁺/ |
| | | | Zn²⁺ |
| A | 163 | 83 | near Ca²⁺/ |
| | | | Zn²⁺ |
| H | 164 | 84 | Zn²⁺ |
| A | 165 | 85 | near Zn²⁺ |
| F | 166 | 86 | near Zn²⁺ |
| Q | 167 | 87 | near Zn²⁺ |
| P | 168 | 88 | near Ca²⁺ |
| G | 169 | 89 | near Ca²⁺ |
| P | 170 | 90 | near Ca²⁺ |
| G | 171 | 91 | Ca²⁺ |
| I | 172 | 92 | near Ca²⁺ |
| G | 173 | 93 | Ca²⁺ |
| G | 174 | 94 | near Ca²⁺ |
| D | 175 | 95 | Ca²⁺ |
| A | 176 | 96 | near Ca²⁺/ |
| | | | Zn²⁺ |
| H | 177 | 97 | Zn²⁺ |
| F | 178 | 98 | near Ca²⁺/ |
| | | | Zn²⁺ |
| D | 179 | 99 | Ca²⁺ |
| E | 180 | 100 | Ca²⁺ |
| D | 181 | 101 | near Ca²⁺ |
| E | 182 | 102 | Ca²⁺ |
| R | 183 | 103 | near Ca²⁺ |
| W | 184 | 104 | near Ca²⁺ |
| T | 185 | 105 | near Ca²⁺ |
| V | 196 | 116 | near Zn²⁺ |
| A | 197 | 117 | near Zn²⁺ |
| A | 198 | 118 | near Zn²⁺ |
| H | 199 | 119 | Zn²⁺ |
| E | 200 | 120 | near Zn²⁺- |
| | | | active site |
| L | 201 | 121 | near Zn²⁺ |
| G | 202 | 122 | near Zn ²⁺ |
| H | 203 | 123 | Zn²⁺ |
| S | 204 | 124 | near Zn²⁺ |
| L | 205 | 125 | near Zn²⁺ |
| G | 206 | 126 | near Zn²⁺ |
| L | 207 | 127 | near Zn²⁺ |
| S | 208 | 128 | near Zn²⁺ |
| H | 209 | 129 | Zn²⁺ |
| S | 210 | 130 | near Zn²⁺ |
| T | 211 | 131 | near Zn²⁺ |
| D | 212 | 132 | near Zn²⁺ |
| L | 263 | 183 | near Ca²⁺ |
| T | 264 | 184 | near Ca²⁺ |
| F | 265 | 185 | near Ca²⁺ |
| D | 266 | 186 | Ca²⁺ |
| A | 267 | 187 | near Ca²⁺ |
| I | 268 | 188 | near Ca²⁺ |
| T | 269 | 189 | near Ca²⁺ |
| N | 307 | 227 | near Ca²⁺ |
| G | 308 | 228 | near Ca²⁺ |
| L | 309 | 229 | near Ca²⁺ |
| E | 310 | 230 | Ca²⁺ |
| A | 311 | 231 | near Ca²⁺ |
| A | 312 | 232 | near Ca²⁺ |
| Y | 313 | 233 | near Ca²⁺ |
| K | 356 | 276 | near Ca²⁺ |
| H | 357 | 277 | near Ca²⁺ |
| I | 358 | 278 | near Ca²⁺ |
| D | 359 | 279 | Ca²⁺ |
| A | 360 | 280 | near Ca²⁺ |
| A | 361 | 281 | near Ca²⁺ |
| L | 362 | 282 | near Ca²⁺ |
| H | 405 | 325 | near Ca²⁺ |
| K | 406 | 326 | near Ca²⁺ |
| V | 407 | 327 | near Ca²⁺ |
| D | 408 | 328 | Ca²⁺ |
| A | 409 | 329 | near Ca²⁺ |
| V | 410 | 330 | near Ca²⁺ |
| F | 411 | 331 | near Ca²⁺ |

[0318] Amino Acids Involved in Calcium Coordination

[0319] In particular examples herein, modified MMPs provided herein, such as a modified MMP-1 polypeptides, are those that contain at least one amino acid replacement at or near (i.e., within 3 residues of) any one or more positions corresponding to any of the residues directly involved with calcium coordination. In such examples, the amino acid replacement or replacements can be at any one or more positions corresponding to any of the following positions: 102, 103, 104, 105, 106, 107, 108, 136, 137, 138, 139, 140, 141, 142, 153, 154, 155, 156, 157, 158, 159, 160, 161, 162, 163, 164, 168, 169, 170, 171, 172, 173, 174, 175, 176, 177, 178, 179, 180, 181, 182, 183, 184, 185, 263, 264, 265, 266, 267, 268, 269, 307, 308, 309, 310, 311, 312, 313, 356, 357, 358, 359, 360, 361, 362, 405, 406, 407, 408, 409, 410, 411 with reference to positions set forth in SEQ ID NO:2. For example, the amino acid replacements can be replacements at one or more positions corresponding to position tyrosine (Y) 102, T103, P104, D105, L106, P107, R108, G136, Q137, A138, D139, I140, M141, I142, 5153, P154, F155, D156, G157, P158, G159, G160, N161, L162, A163, H164, P168, G169, P170, G171, I172, G173, G174, D175, A176, H177, F178, D179, E180, D181, E182, R183, W184, T185, L263, T264, F265, D266, A267, I268, T269, N307, G308, L309, E310, A311, A312, Y313, K356, H357, I358, D359, A360, A361, L362, H405, K406, V407, D408, A409, V410, F411, with reference to amino acid positions set forth in SEQ ID NO:2. With reference to SEQ ID NO:5, the amino acid replacements can be replacements at one or more positions tyrosine (Y) 22, T23, P24, D25, L26, P27, R28, G56, Q57, A58, D59, I60, M61, I62, S73, P74, F75, D76, G77, P78, G79, G80, N81, L82, A83, H84, P88, G89, P90, G91, I92, G93, G94, D95, A96, H97, F98, D99, E100, D101, E102, R103, W104, T105, L183, T184, F185, D186, A187, I188, T189, N227, G228, L229, E230, A231, A232, Y233, K276, H277, I278, D279, A280, A281, L282, H325, K326, V327, D328, A329, V330, F331, with reference to amino acid positions set forth in SEQ ID NO:5. The modified MMP polypeptide, such as a modified MMP-1 polypeptide, can contain an amino acid replacement at the indicated position, such as any amino acid replacement set forth in Table 5, and in particular any amino acid replacement as set forth herein above at the corresponding position with reference to the positions set forth in SEQ ID NO:2.

[0320] In some examples, the amino acid replacement or replacements include at least one amino acid replacement at a position directly involved with calcium coordination. In such examples, the amino acid replacement or replacements include at least one amino acid replacement or replacements at any one or more positions corresponding to any of the following positions: 105, 139, 156, 157, 159, 161, 171, 173, 175, 179, 180, 182, 266, 310, 359, 408, with reference to positions set forth in SEQ ID NO:2. For example, the amino acid positions can be replacements at one or more positions corresponding to replacement of (D) at position 105 (D105), D139, D156, G157, G159, N161, G171, G173, D175, D179, E180, E182, D266, E310, D359 or D408, with reference to amino acid positions set forth in SEQ ID NO:2. With reference to SEQ ID NO:5, the amino acid replacements can be replacements at one or more positions D25, D59, D76, G77, G79, N81, G91, G93, D95, D99, E100, E102, D186, E230, D279 or D328, with reference to amino acid positions set forth in SEQ ID NO:5. The modified MMP polypeptide, such as a modified MMP-1 polypeptide, can contain an amino acid replacement at the indicated position, such as any amino acid replacement set forth in Table 5, and in particular any amino acid replacement as set forth herein above at the corresponding position with reference to the positions set forth in SEQ ID NO:2.

[0321] In particular examples herein, the unmodified MMP has an acidic amino acid (e.g., aspartic acid or glutamic acid) at the modified positions, such as for example, an amino acid position corresponding to any of positions 105, 139, 156, 175, 179, 180, 182, 266, 310, 359 or 408 with reference to positions set forth in SEQ ID NO:2, and in particular at an amino acid position corresponding to any of positions 105, 156, 179, 180 or 182. In such examples, the amino acid replacement is replacement by a non-acidic amino acid residue at the modified position. In one example, the modified MMP, such as a modified MMP-1 polypeptide, contains replacement of an acidic amino acid (e.g., aspartic acid or glutamic acid) at a position corresponding to any of positions 105, 139, 156, 175, 179, 180, 182, 266, 310, 359 or 408, and generally corresponding to any of positions 105, 156, 179, 180 or 182, with a neutral amino acid residue that is a cysteine (C), asparagine (N), glutamine (Q), threonine (T), tyrosine (Y), serine (S) or glycine (G). In particular examples, the replacement is with a threonine or asparagine. In another example, the modified MMP, such as a modified MMP-1 polypeptide, contains replacement of an acidic amino acid (e.g., aspartic acid or glutamic acid) at a position corresponding to any of positions 105, 139, 156, 175, 179, 180, 182, 266, 310, 359 or 408, and generally at a position corresponding to any of positions 105, 156, 179, 180 or 182, with a hydrophobic amino acid that is a phenylalanine (F), methionine (M), tryptophan (W), isoleucine (I), valine (V), leucine (L), alanine (A) or proline (P). In a further example, the modified MMP, such as a modified MMP-1 polypeptide, contains replacement of an acidic amino acid (e.g., aspartic acid or glutamic acid) at a position corresponding to any of positions 105, 139, 156, 175, 179, 180, 182, 266, 310, 359 or 408, and generally at a position corresponding to any of positions 105, 156, 179, 180 or 182, with a basic amino acid that is a histidine (H), lysine (K) or arginine (R).

[0322] In another example herein, the unmodified MMP has a neutral amino acid (e.g., a cysteine, asparagine, glutamine, threonine, tyrosine, serine or glycine) at the modified position, such as for example, an amino acid position corresponding to any of positions 157, 159, 161, 171, 173, with reference to positions set forth in SEQ ID NO:2, and in particular at an amino acid position corresponding to position 159. In such examples, the amino acid replacement is replacement by a hydrophobic amino acid residue at the modified position. In one example, the modified MMP, such as a modified MMP-1 polypeptide, contains replacement of a neutral amino acid at a position corresponding to any of positions 157, 159, 161, 171, 173, and generally corresponding to position 159, with a hydrophobic amino acid residue that is a phenylalanine (F), methionine (M), tryptophan (W), isoleucine (I), valine (V), leucine (L), alanine (A) or proline (P).

[0323] Exemplary of modified MMP polypeptides provided herein containing at least one amino acid replacement at a position directly involved with calcium coordination, such as a modified MMP-1, are those that contain at least one amino acid replacement from among replacement with: A at a position corresponding to position 105; C at a position corresponding to position 105; F at a position corresponding to position 105; G at a position corresponding to position 105; I at a position corresponding to position 105; L at a position corresponding to position 105; M at a position corresponding to position 105; N at a position corresponding to position 105; P at a position corresponding to position 105; R at a position corresponding to position 105; S at a position corresponding to position 105; T at a position corresponding to position 105; V at a position corresponding to position 105; W at a position corresponding to position 105; H at a position corresponding to position 156; L at a position corresponding to position 156; A at a position corresponding to position 156; W at a position corresponding to position 156; C at a position corresponding to position 156; P at a position corresponding to position 156; V at a position corresponding to position 156; K at a position corresponding to position 156; S at a position corresponding to position 156; G at a position corresponding to position 156; T at a position corresponding to position 156; Y at a position corresponding to position 156; R at a position corresponding to position 156; M at a position corresponding to position 156; P at a position corresponding to position 159; V at a position corresponding to position 159; A at a position corresponding to position 159; M at a position corresponding to position 159; I at a position corresponding to position 159; W at a position corresponding to position 159; L at a position corresponding to position 159; P at a position corresponding to position 179; L at a position corresponding to position 179; G at a position corresponding to position 179; G at a Position corresponding to position 179; S at a position corresponding to position 179; A at a position corresponding to position 179; K at a position corresponding to position 179; T at a position corresponding to position 179; I at a position corresponding to position 179; R at a position corresponding to position 179; N at a position corresponding to position 179; W at a position corresponding to position 179; Q at a position corresponding to position 179; V at a position corresponding to position 179; C at a position corresponding to position 179; M at a position corresponding to position 180; P at a position corresponding to position 180; K at a position corresponding to position 180; Y at a position corresponding to position 180; Q at a position corresponding to position 180; R at a position corresponding to position 180; A at a position corresponding to position 180; T at a position corresponding to position 180; I at a position corresponding to position 180; F at a position corresponding to position 180; C at a position corresponding to position 180; G at a position corresponding to position 180; S at a position corresponding to position 180; N at a position corresponding to position 180; C at a position corresponding to position 182; P at a position corresponding to position 182; P at a position corresponding to position 182; S at a position corresponding to position 182; T at a position corresponding to position 182; R at a position corresponding to position 182; A at a position corresponding to position 182; F at a position corresponding to position 182; L at a position corresponding to position 182; I at a position corresponding to position 182; Y at a position corresponding to position 182; Q at a position corresponding to position 182; W at a position corresponding to position 182; M at a position corresponding to position 182; or G at a position corresponding to position 182, with reference to amino acid positions set forth in SEQ ID NO:2.

[0324] In particular, the amino acid replacement is replacement A at a position corresponding to position 105; I at a position corresponding to position 105; N at a position corresponding to position 105; L at a position corresponding to position 105; G at a position corresponding to position 105; R at a position corresponding to position 156; H at a position corresponding to position 156; K at a position corresponding to position 156; T at a position corresponding to position 156; V at a position corresponding to position 159; N at a position corresponding to position 179; T at a position corresponding to position 180; F at a position corresponding to position 180; and T at a position corresponding to position 182, with reference to amino acid positions set forth in SEQ ID NO:2. In particular examples, the amino acid replacement is replacement with threonine (T) at a position corresponding to position 156; replacement with valine (V) at a position corresponding to position 159; and/or replacement with Asparagine (N) at a position corresponding to position 179, with reference to positions set forth in SEQ ID NO:2.

[0325] Any of the above modifications, such as amino acid replacements, at an amino acid residue involved in calcium coordination can be made at a corresponding position of a MMP polypeptide, such as any set forth in SEQ ID NOS:17, 20, 23, 26, 29, 32, 35, 38, 41, 44, 47, 50, 53, 56, 59, 62, 65, 68, 71, 74, 76, 80, 83, or mature or catalytically active form thereof or variants of any of such forms, such as those that exhibit at least 60%, 70%, 75%, 80%, 85%, 86%, 87%, 88%, 89%, 90%, 91%, 92%, 93%, 94%, 95%, 96%, 97%, 98%, 99% or more sequence identity to any of SEQ ID NOS:17, 20, 23, 26, 29, 32, 35, 38, 41, 44, 47, 50, 53, 56, 59, 62, 65, 68, 71, 74, 76, 80, 83. For example, the modifications (e.g., amino acid replacements) can be made in a mature or catalytically active form of any of the above polypeptides, such as any MMP polypeptide set forth in any of SEQ ID NOS:5, 132, 133, 134, 135, 137, 138, 140, 143 or 145 or a catalytically active fragment thereof, or any form or variant thereof that has a sequence of amino acids that exhibits at least 70%, 75%, 80%, 85%, 86%, 87%, 88%, 89%, 90%, 91%, 92%, 93%, 94%, 95%, 96%, 97%, 98%, 99% or more sequence identity to any of SEQ ID NOS:5, 132, 133, 134, 135, 137, 138, 140, 143 or 145 or a catalytically active fragment thereof, so long as the modified MMP exhibits increased activity at a calcium concentration greater than physiological levels compared to activity at physiological concentrations of calcium. Table 6 depicts exemplary corresponding amino acid replacements with reference to exemplary zymogen forms of modified MMPs (e.g., FIGS. 2A-2C). For use in the methods herein, the modified MMP includes any active or catalytically active form of the modified zymogen lacking the propeptide domain and including the corresponding amino acid replacement(s).

TABLE 6
Exemplary modifications in MMPs

| | SEQ | |
|---|---|---|
| MMP | ID NO | Amino Acid Modifications |
| MMP-1 | 2 | D105A; D105I; D105N; D105L; D105G; D156R; |
| (zymogen) | | D156K; D156H; D156T; G159V; D179N; E180T; |
| | | E180F; E182T |
| MMP-1 | 5 | D25A; D25I; D25N; D25L; D25G; D76R; D76K; |
| (mature) | | D76H; D76T; G79V; D99N; E100T; E100F; E102T |
| MMP-8 | 17 | Q103A; Q103I; Q103N; Q103L; Q105G; D154R; |
| | | D154K; D154H; D154T; N157V; D177N; A180T; |
| | | A180F; E182T |
| MMP-13 | 20 | D109A; D109I; D109N; D109L; D109G; D160R; |
| | | D160K; D160H; D160T; S163V; D183N; D184T; |
| | | D184F; E186T |
| MMP-18 | 23 | D107A; D107I; D107N; D107L; D107G; D158R; |
| | | D158K; D158H; D158T; G161V; D181N; E182T; |
| | | E182F; E184T |

[0326] In particular examples, the amino acid replacement or replacements is in a MMP-1 polypeptide, such as in a precursor MMP-1 polypeptide set forth in SEQ ID NO:1, an inactive pro-enzyme MMP-1 containing the propeptide (zymogen form) set forth in SEQ ID NO:2, a mature MMP-1 polypeptide lacking the propeptide set forth in SEQ ID NO:5, or any variant (e.g., species, allelic or modified variant) or active fragment thereof that has 40%, 50%, 60%, 70%, 80%, 90%, 91%, 92%, 93%, 94%, 95%, 96%, 97%, 98%, or 99% sequence identity to any of the MMP-1 polypeptides set forth in SEQ ID NOS:1, 2 or 5, so long as the modified MMP polypeptide retains increased calcium dependency for enzymatic activity. For example, provided herein are modified MMP-1 polypeptides: containing an amino acid replacement corresponding to G159V having the sequence of amino acids set forth in SEQ ID NO:158 (zymogen form) or in an SEQ ID NO:162 (mature form); containing an amino acid replacement corresponding to D156T having the sequence of amino acids set forth in SEQ ID NO:160 (zymogen form) or SEQ ID NO:164 (mature form); or containing an amino acid replacement corresponding to D179N having the sequence of amino acids set forth in SEQ ID NO:161 (zymogen form) or SEQ ID NO:165 (mature form). Also provided herein are modified MMP-1 polypeptides having a sequence of amino acids that exhibits at least 70%, 80%, 90%, 91%, 92%, 93%, 94%, 95%, 96%, 97%, 98%, or 99% sequence identity to any of the MMP-1 polypeptides set forth in SEQ ID NOS:158, 160, 161, 162, 164 or 165, so long as the modified MMP polypeptide contains the corresponding amino acid replacement and retains increased calcium dependency for enzymatic activity.

[0327] In particular, provided herein is a modified MMP polypeptide, such as a modified MMP-1 polypeptide, that contains an amino acid replacement of valine (V) at a position corresponding to position 159, and in particular in a position corresponding to Gly159. G159 is highly conserved among MMP proteins (see e.g., Maskos et al. (2005) Biochimie 87:249-263). Exemplary of such a modified MMP is one that exhibits at least 40%, 50%, 60%, 70%, 75%, 80%, 85%, 86%, 87%, 88%, 89%, 90%, 91%, 92%, 93%, 94%, 95%, 96%, 97%, 98%, 99% or more sequence identity to SEQ ID NO:2 or SEQ ID NO:5, and contains the amino acid replacement corresponding to G159V. For example, the modified MMP polypeptide is a MMP-1 polypeptide that contains the amino acid replacement G159V with reference to SEQ ID NO:2, which corresponds to G79V with reference to SEQ ID NO:5. Such modified polypeptides include those that have the sequence of amino acids set forth in SEQ ID NO:158 (zymogen form) or SEQ ID NO:162 (mature form), or that have a sequence of amino acids that exhibits at least 70%, 80%, 90%, 91%, 92%, 93%, 94%, 95%, 96%, 97%, 98%, or 99% sequence identity to any of the MMP-1 polypeptides set forth in SEQ ID NOS:158 or 162, so long as the modified MMP polypeptide retains increased calcium dependency for enzymatic activity. G159 is located between n-sheet strands III and IV in the S-loop, and coordinating the calcium 3 calcium molecule along with five other amino acids (156, 157, 161, 179 and 182) facilitates the stabilization of the S-loop to the underlying β-sheet strand IV, which, in turn, is involved in tertiary structure stabilization. Hence, position 159, such as G159, plays a role in Ca²⁺ binding. In particular, substitution of the larger, hydrophobic side chain of valine for the hydrogen molecule of glycine, or other neutral amino acid, disrupts the structure of the Ca²⁺ binding pocket such that its affinity for Ca²⁺ is altered. At higher concentrations of Ca²⁺, the tertiary structure is stabilized but as the concentration decreases, Ca²⁺ does not bind as efficiently. Concomitant with the decreased Ca²⁺ binding also is the loss of tertiary structure and the subsequent inactivation and autolysis of the protein.

[0328] 2. Modification of a Residue Corresponding to Position 227

[0329] Also among the modified csMMP polypeptides provided herein for use in the methods herein are csMMP polypeptides containing an amino acid modification in a starting, unmodified MMP at an amino acid residue that corresponds to position 227, with reference to SEQ ID NO:2. Typically, the modification is an amino acid replacement. The amino acid replacement can be to any other amino acid so long as the resulting modified MMP polypeptide exhibits calcium sensitivity at concentrations of calcium greater than the physiological concentration, and reduced activity at physiological concentrations of calcium. For example, amino acid replacements include replacement of amino acids to an acidic (D or E); basic (H, K or R); neutral (C, N, Q, T, Y, S, G) or hydrophobic (F, M, W, I, V, L A, P) amino acid residue. For example, amino acid replacements at the noted position include replacement by amino acid residues E, H, R, C, Q, T, S, G, M, W, I, V, L, A, P, N, F, D, Y or K. In particular examples herein, the amino acid replacement is to a glutamic acid (E).

[0330] The modification (e.g., amino acid replacement) can be made at a corresponding position in a MMP polypeptide, such as any set forth in SEQ ID NOS:17, 20, 23, 26, 29, 32, 35, 38, 41, 44, 47, 50, 53, 56, 59, 62, 65, 68, 71, 74, 76, 80, 83, or mature or catalytically active form thereof or variants of any of such forms, such as those that exhibit at least 60%, 70%, 75%, 80%, 85%, 86%, 87%, 88%, 89%, 90%, 91%, 92%, 93%, 94%, 95%, 96%, 97%, 98%, 99% or more sequence identity to any of SEQ ID NOS:17, 20, 23, 26, 29, 32, 35, 38, 41, 44, 47, 50, 53, 56, 59, 62, 65, 68, 71, 74, 76, 80, 83. For example, the modification (e.g., amino acid replacement) can be made in a mature or catalytically active form of any of the above polypeptides, such as any MMP polypeptide set forth in any of SEQ ID NOS:5, 132, 133, 134, 135, 137, 138, 140, 143 or 145 or a catalytically active fragment thereof, or any form or variant thereof that has a sequence of amino acids that exhibits at least 70%, 75%, 80%, 85%, 86%, 87%, 88%, 89%, 90%, 91%, 92%, 93%, 94%, 95%, 96%, 97%, 98%, 99% or more sequence identity to any of SEQ ID NOS:5, 132, 133, 134, 135, 137, 138, 140, 143 or 145 or a catalytically active fragment thereof, so long as the modified MMP exhibits increased activity at a calcium concentration greater than physiological levels compared to activity at physiological concentrations of calcium.

[0331] For example, provided herein are modified MMP polypeptides, such as modified MMP-1 polypeptides, having an amino acid replacement corresponding to V227E, with reference to positions set forth in SEQ ID NO:2. Such modified polypeptides include those that have the sequence of amino acids set forth in SEQ ID NO:157 (zymogen form) or SEQ ID NO:167 (mature form), or that have a sequence of amino acids that exhibits at least 70%, 80%, 90%, 91%, 92%, 93%, 94%, 95%, 96%, 97%, 98%, or 99% sequence identity to any of the MMP-1 polypeptides set forth in SEQ ID NOS:157 or 167, so long as the modified MMP polypeptide retains increased calcium dependency for enzymatic activity.

[0332] 3. Combination Mutants

[0333] Modified MMP polypeptides, such as modified MMP-1 polypeptides, used in the methods provided herein, can contain any two or more modifications described above, whereby the resulting modified MMP exhibits calcium-sensitive activity in the presence of high calcium concentrations greater than physiological levels, and decreased activity in the presence of physiological levels of calcium. For example, MMP-1 polypeptides can contain 2, 3, 4, 5, 6, 7, 8, 9, 10, 11, 12, 13, 14, 15, 16, 17, 18, 19, 20 or more modifications compared to a starting or reference MMP-1 polypeptide. Such combination mutants are calcium sensitive and can exhibit the same, more, or less calcium dependence as compared to a csMMP-1 polypeptide containing a single modified residue or fewer modified residues. Typically, combination mutants retain activity at high concentrations of calcium (e.g., 10 mM Ca²⁺) compared to the single mutant MMP-1 polypeptides alone or compared to an unmodified MMP-1 polypeptide not containing the amino acid changes (e.g., a wild-type MMP-1 polypeptide set forth in SEQ ID NO:2 or active forms or other forms thereof) in the presence of high calcium concentrations (e.g., 10 mM Ca²⁺).

[0334] For example, a modified MMP polypeptide, such as a modified MMP-1 polypeptide, provided herein for use in the methods include polypeptides with any two or more modifications at positions as described above. In particular examples, the modified MMP polypeptide, such as a modified MMP-1 polypeptide, contains two or more modifications at positions described above that are at or near metal-binding sites. For example, modified MMP-1 polypeptides provided herein contain amino acid replacements, such as any described above, at any two or more positions corresponding to any of the following positions: 102, 103, 104, 105, 106, 107, 108, 136, 137, 138, 139, 140, 141, 142, 146, 147, 148, 149, 150, 151, 152, 153, 154, 155, 156, 157, 158, 159, 160, 161, 162, 163, 164, 165, 166, 167, 168, 169, 170, 171, 172, 173, 174, 175, 176, 177, 178, 179, 180, 181, 182, 183, 184, 185, 196, 197, 198, 199, 201, 202, 203, 204, 205, 206, 207, 208, 209, 210, 211, 212, 263, 264, 265, 266, 267, 268, 269, 307, 308, 309, 310, 311, 312, 313, 356, 357, 358, 359, 360, 361, 362, 405, 406, 407, 408, 409, 410, 411, with reference to positions set forth in SEQ ID NO:2. The two or more modifications (e.g., amino acid replacements) can be made at a corresponding position of a MMP polypeptide, such as any set forth in SEQ ID NOS:17, 20, 23, 26, 29, 32, 35, 38, 41, 44, 47, 50, 53, 56, 59, 62, 65, 68, 71, 74, 76, 80, 83, or mature or catalytically active form thereof or variants of any of such forms, such as those that exhibit at least 60%, 70%, 75%, 80%, 85%, 86%, 87%, 88%, 89%, 90%, 91%, 92%, 93%, 94%, 95%, 96%, 97%, 98%, 99% or more sequence identity to any of SEQ ID NOS:17, 20, 23, 26, 29, 32, 35, 38, 41, 44, 47, 50, 53, 56, 59, 62, 65, 68, 71, 74, 76, 80, 83. For example, the two or more modifications (e.g., amino acid replacements) can be made in a mature or catalytically active form of any of the above polypeptides, such as any MMP polypeptide set forth in any of SEQ ID NOS:5, 132, 133, 134, 135, 137, 138, 140, 143 or 145 or a catalytically active fragment thereof, or any form or variant thereof that has a sequence of amino acids that exhibits at least 70%, 75%, 80%, 85%, 86%, 87%, 88%, 89%, 90%, 91%, 92%, 93%, 94%, 95%, 96%, 97%, 98%, 99% or more sequence identity to any of SEQ ID NOS:5, 132, 133, 134, 135, 137, 138, 140, 143 or 145 or a catalytically active fragment thereof, so long as the modified MMP exhibits increased activity at a calcium concentration greater than physiological levels compared to activity at physiological concentrations of calcium.

[0335] For example, among the modified MMP polypeptides provided herein are polypeptides that contain a modification at a position corresponding to position 159 (e.g., G159) with reference to positions set forth in SEQ ID NO:2, and another modification at another position at or near a metal binding site. Exemplary of such an additional replacement is replacement with a basic amino acid, for example, lysine (K), at a position corresponding to position 208, with reference to amino acid positions set forth in SEQ ID NO:2. For example, provided herein are modified MMP polypeptides, such as modified MMP-1 polypeptides, having amino acid replacements corresponding to G159V and S208K, with reference to positions set forth in SEQ ID NO:2. Such modified polypeptides include those that have the sequence of amino acids set forth in SEQ ID NO:159 (zymogen form) or SEQ ID NO:163 (mature form), or that have a sequence of amino acids that exhibits at least 70%, 80%, 90%, 91%, 92%, 93%, 94%, 95%, 96%, 97%, 98%, or 99% sequence identity to any of the MMP-1 polypeptides set forth in SEQ ID NOS:159 or 163, so long as the modified MMP polypeptide retains increased calcium dependency for enzymatic activity.

[0336] In particular, modified MMP polypeptides, such as modified MMP-1 polypeptides, provided herein can include any two or more modifications (e.g., amino acid replacements) at positions involved in calcium coordination from among any of the following positions: 102, 103, 104, 105, 106, 107, 108, 136, 137, 138, 139, 140, 141, 142, 153, 154, 155, 156, 157, 158, 159, 160, 161, 162, 163, 164, 168, 169, 170, 171, 172, 173, 174, 175, 176, 177, 178, 179, 180, 181, 182, 183, 184, 185, 263, 264, 265, 266, 267, 268, 269, 307, 308, 309, 310, 311, 312, 313, 356, 357, 358, 359, 360, 361, 362, 405, 406, 407, 408, 409, 410, 411 with reference to positions set forth in SEQ ID NO:2. Exemplary modified MMP polypeptides contain two or more modifications at any of positions 105, 156, 159, 179, 180 or 182, and generally two or more modifications at positions 156, 159 or 179, each with reference to positions set forth in SEQ ID NO:2. Typically, the modification is an amino acid replacement, such as any replacement at the noted positions as described above. For example, provided herein is a modified MMP polypeptide, such as a modified MMP-1 polypeptide, having amino acid replacements corresponding to D156T and D179N, with reference to positions set forth in SEQ ID NO:2. Such modified polypeptides include those that have the sequence of amino acids set forth in SEQ ID NO:156 (zymogen form) or SEQ ID NO:166 (mature form), or that have a sequence of amino acids that exhibits at least 70%, 80%, 90%, 91%, 92%, 93%, 94%, 95%, 96%, 97%, 98%, or 99% sequence identity to any of the MMP-1 polypeptides set forth in SEQ ID NOS:156 or 166, so long as the modified MMP polypeptide retains increased calcium dependency for enzymatic activity.

[0337] 4. Additional Modifications

[0338] Any modified MMP polypeptide, such as any modified MMP-1 polypeptide, provided for use in the methods also can contain one or more other modifications described in the art, so long as the modified polypeptide retains increased calcium dependency for enzymatic activity. In addition to containing one or more modification(s) described above in Sections D.1-D.3, any modified MMP-1 polypeptide provided herein can contain 1, 2, 3, 4, 5, 6, 7, 8, 9, 10, 11, 12, 13, 14, 15, 16, 17, 18, 19, 20 or more additional modifications. The additional modifications can include modifications of the primary sequence and modifications not in the primary sequence of the polypeptide (e.g., post-translational modifications, conjugations or fusions), including any known in the art. For example, any amino acid substitution, deletion or insertion known in the art can be included. The additional modifications can confer additional properties to the enzyme, for example, increased stability, increased half-life and/or increased resistance to inhibitors, for example, TIMP.

[0339] The additional modification can be any one or more of the modifications set forth in Table 7 corresponding to amino acid positions in human MMP-1 as set forth in SEQ ID NO:2: In other examples, modified MMP polypeptides, including modified MMP-1 polypeptides, for use in the methods herein can contain only one, or more than one, of the amino acid replacements set forth in Table 7, whereby the resulting modified polypeptide exhibits calcium-sensitive activity in the presence of high calcium concentrations greater than physiological levels, and decreased activity in the presence of physiological levels of calcium.

TABLE 7
Additional Modifications

| | Corresponding | |
|---|---|---|
| | hMMP-1 | |
| Posi- | Residue (SEQ | |
| tion | ID NO: 2) | Amino Acid Substitutions |
| 81 | F | E; H; R; C; Q; T; S; G; M; W; I; V; L; A; P |
| 82 | V | R; C; N; Q; T; Y; S; G; F; M; W; I; L; A; P |
| 83 | L | D; E; H; R; C; Q; T; Y; S; G; M; W; I; A; P |
| 84 | T | D; E; H; R; C; Q; Y; S; G; F; I; V; L; A; P |
| 85 | E | K; R; C; N; Q; T; Y; S; G; F; M; V; L; A; P |
| 86 | G | D; H; K; C; N; T; Y; S; F; M; W; I; V; L; P |
| 87 | N | E; H; R; C; Q; Y; S; G; F; M; I; V; L; A; P |
| 88 | P | D; E; H; K; R; C; Q; T; Y; G; W; I; V; L; A |
| 89 | R | E; H; K; N; T; Y; S; G; F; M; W; V; L; A; P |
| 90 | W | E; H; R; N; Q; T; S; G; F; M; I; V; L; A; P |
| 91 | E | D; H; R; C; N; T; Y; S; G; F; W; I; V; L; A |
| 92 | Q | E; K; R; N; T; Y; S; G; F; W; I; V; L; A; P |
| 93 | T | D; E; K; R; N; S; G; F; M; W; I; V; L; A; P |
| 94 | H | D; E; R; N; T; S; G; F; M; W; I; V; L; A; P |
| 95 | L | D; E; H; K; R; C; T; Y; S; G; W; I; V; A; P |
| 96 | T | E; H; R; C; N; Q; S; G; F; W; I; V; L; A; P |
| 97 | Y | D; E; H; K; R; N; Q; T; S; G; W; V; L; A; P |
| 98 | R | D; E; H; K; C; Y; S; G; F; M; W; V; L; A; P |
| 99 | I | E; H; R; C; N; Q; T; Y; S; G; F; W; V; L; A; P |
| 100 | E | D; H; R; N; T; Y; S; G; F; M; W; I; V; L; P |
| 101 | N | D; H; K; R; C; T; Y; S; F; M; W; V; L; A; P |
| 102 | Y | D; E; K; R; C; N; Q; S; G; F; M; V; L; A; P |
| 103 | T | D; E; K; R; C; N; Q; Y; S; G; W; V; L; A; P |
| 104 | P | D; E; H; R; C; Q; T; Y; S; G; F; M; V; L; A |
| 105 | D | E; R; C; N; T; S; G; F; M; W; I; V; L; A; P |
| 106 | L | D; H; R; C; N; T; Y; S; G; F; M; I; V; A; P |
| 107 | P | D; K; R; C; T; Y; S; G; F; M; W; I; V; L; A |
| 108 | R | E; K; C; N; T; Y; S; G; F; W; I; V; L; A; P |
| 109 | A | D; E; H; R; N; Q; T; Y; S; G; M; W; I; V; L; |
| 110 | D | H; R; C; Q; T; Y; S; G; F; M; I; V; L; A; P |
| 111 | V | D; E; K; R; C; Q; T; Y; S; G; W; I; L; A; P |
| 112 | D | H; K; R; C; Q; T; Y; S; G; F; M; W; I; V; L; A; P |
| 113 | H | D; E; R; N; T; Y; S; G; F; M; W; V; L; A; P |
| 114 | A | E; R; C; N; Q; T; S; G; F; M; W; I; V; L; P |
| 115 | I | D; E; H; K; R; C; Q; T; S; G; F; W; V; L; P |
| 116 | E | D; H; K; R; C; N; Q; S; G; F; M; I; L; A; P |
| 117 | K | D; E; H; R; N; Q; T; Y; S; G; F; W; L; A; P |
| 118 | A | D; E; H; K; R; Q; T; S; G; F; W; I; V; L; P |
| 119 | F | E; H; K; R; C; N; T; Y; S; G; W; V; L; A; P |
| 120 | Q | D; E; H; K; R; C; N; T; Y; G; M; W; V; A; P |
| 121 | L | E; H; K; R; C; N; Q; T; S; G; F; I; V; A; P |
| 122 | W | E; H; K; R; N; Q; T; Y; S; G; F; V; L; A; P |
| 123 | S | D; H; K; R; C; N; Q; T; Y; G; F; M; W; I; V; L; |
| | | A; P |
| 124 | N | D; K; R; C; T; S; G; F; M; W; I; V; L; A; P |
| 125 | V | D; E; H; R; C; Q; T; Y; S; G; F; M; W; A; P |
| 126 | T | E; H; K; R; N; Q; S; G; F; M; W; V; L; A; P |
| 127 | P | E; H; K; R; C; Q; T; S; F; M; W; I; V; L; A |
| 128 | L | D; K; R; C; Q; T; S; G; F; M; W; I; V; A; P |
| 129 | T | E; H; K; R; C; Y; S; G; F; M; I; V; L; A; P |
| 130 | F | E; H; K; R; C; N; T; Y; S; G; I; V; L; A; P |
| 131 | T | D; E; H; R; C; Q; Y; S; G; F; M; I; L; A; P |
| 132 | K | D; E; H; R; T; Y; S; G; F; M; I; V; L; A; P |
| 133 | V | D; E; H; K; R; C; N; T; S; G; M; W; L; A; P |
| 134 | S | D; E; H; K; R; C; N; Q; T; Y; G; V; L; A; P |
| 135 | E | D; H; R; N; Q; T; S; F; M; W; I; V; L; A; P |
| 136 | G | D; E; H; R; C; N; T; S; M; W; I; V; L; A; P |
| 137 | Q | E; H; K; R; C; N; T; Y; S; G; F; W; L; A; P |
| 138 | A | D; E; H; R; C; Q; T; S; G; M; W; I; V; L; P |
| 139 | D | E; H; R; C; N; Y; S; G; F; M; W; I; V; L; A; P |
| 140 | I | D; E; H; K; R; C; T; Y; G; F; M; W; V; L; A |
| 141 | M | D; E; H; R; C; N; T; Y; S; G; W; I; L; A; P |
| 142 | I | K; R; N; Q; T; Y; S; G; F; M; W; V; L; A; P |
| 143 | S | E; H; R; C; N; Q; T; Y; G; M; W; I; L; A; P |
| 144 | F | E; H; K; R; C; N; Q; T; S; G; M; W; V; L; P |
| 145 | V | D; E; H; K; R; C; N; Q; T; S; G; W; L; A; P |
| 146 | R | D; E; H; K; C; N; Q; T; Y; S; F; V; L; A; P |
| 147 | G | E; H; R; C; Q; T; S; F; M; W; I; V; L; A; P |
| 148 | D | E; K; R; C; N; T; S; G; M; W; I; V; L; A; P |
| 149 | H | E; R; C; N; Q; T; Y; S; G; W; I; V; L; A; P |
| 150 | R | D; E; H; K; N; T; S; G; M; W; I; V; L; A; P |
| 151 | D | K; R; N; Q; T; Y; S; G; F; M; W; V; L; A; P |
| 152 | N | D; H; K; R; C; T; Y; S; G; F; W; I; L; A; P |
| 153 | S | D; H; K; R; C; Q; T; Y; G; F; I; V; L; A; P |
| 154 | P | H; K; R; C; N; Q; T; Y; S; F; W; I; V; L; A |
| 155 | F | E; H; R; N; Q; T; Y; S; G; M; W; V; L; A; P |
| 156 | D | E; H; K; R; C; T; Y; S; G; M; W; V; L; A; P |
| 157 | G | D; H; K; R; N; Q; T; Y; S; F; M; V; L; A; P |
| 158 | P | D; K; R; C; N; Q; T; Y; S; G; F; W; I; V; L; A |
| 159 | G | E; K; R; C; Q; T; Y; S; M; W; I; V; L; A; P |
| 160 | G | E; H; R; C; N; Q; T; S; M; W; I; V; L; A; P |
| 161 | N | E; H; R; C; Q; T; Y; S; G; F; W; I; V; L; P |
| 162 | L | D; E; R; C; Q; T; Y; S; G; F; M; W; I; A; P |
| 163 | A | E; K; R; C; N; Q; T; Y; S; G; F; I; V; L; P |
| 164 | H | E; K; R; C; N; Q; Y; S; G; F; M; V; L; A; P |
| 165 | A | D; H; K; R; N; Q; T; S; G; F; M; W; V; L; P |
| 166 | F | E; H; K; R; C; N; S; G; M; W; I; V; L; A; P |
| 167 | Q | D; E; K; R; N; T; Y; S; G; F; M; V; L; A; P |
| 168 | P | D; H; R; C; N; T; S; G; F; M; W; I; V; L; A |
| 169 | G | D; E; H; R; C; Q; T; S; M; W; I; V; L; A; P |
| 170 | P | D; H; K; R; C; Q; T; S; G; F; M; W; I; L; A |
| 171 | G | D; E; H; K; R; C; N; Q; Y; S; M; W; L; A; P |
| 172 | I | D; E; R; C; N; Q; T; Y; G; M; W; V; L; A; P |
| 173 | G | D; K; R; C; N; T; Y; S; F; M; W; V; L; A; P |
| 174 | G | D; E; H; R; N; T; Y; S; F; M; W; V; L; A; P |
| 175 | D | E; H; R; C; N; Q; T; Y; S; G; F; I; V; L; A; P |
| 176 | A | D; E; K; R; C; N; Q; T; S; G; F; W; V; L; P |
| 177 | H | D; R; C; N; Q; T; Y; S; G; W; I; V; L; A; P |
| 178 | F | E; H; K; R; C; Q; T; Y; S; G; W; I; V; L; A; P |
| 179 | D | E; K; R; C; N; Q; T; S; G; W; I; V; L; A; P |
| 180 | E | D; K; R; C; N; Q; T; Y; S; G; F; M; I; A; P |
| 181 | D | E; K; R; C; Q; T; Y; S; G; F; M; V; L; A; P |
| 182 | E | D; R; C; Q; T; Y; S; G; F; M; W; I; L; A; P |
| 183 | R | E; H; K; C; N; T; S; G; M; W; I; V; L; A; P |
| 184 | W | E; H; R; N; Q; T; S; G; F; M; I; V; L; A; P |
| 185 | T | D; E; H; R; C; N; Q; Y; S; G; W; V; L; A; P |
| 186 | N | D; E; H; R; C; Q; T; Y; S; G; F; V; L; A; P |
| 187 | N | D; H; K; R; C; T; S; G; F; M; W; I; L; A; P |
| 188 | F | D; E; H; K; R; N; Q; S; G; W; I; V; L; A; P |
| 189 | R | D; E; H; K; C; N; Q; T; Y; G; W; V; L; A; P |
| 190 | E | D; H; K; R; C; T; Y; S; G; M; I; V; L; A; P |
| 191 | Y | D; E; H; K; R; C; Q; T; S; G; W; V; L; A; P |
| 192 | N | D; H; K; R; C; Q; T; S; G; M; W; V; L; A; P |
| 193 | L | D; E; K; R; N; Q; T; Y; S; G; F; W; I; A; P |
| 194 | H | E; K; Q; T; Y; S; G; F; M; W; I; V; L; A; P |
| 195 | R | D; E; K; C; Q; T; Y; S; G; F; W; V; L; A; P |
| 196 | V | D; E; H; K; R; Q; T; Y; S; G; M; I; L; A; P |
| 197 | A | E; H; R; C; N; Q; T; Y; S; G; W; I; V; L; P |
| 198 | A | D; E; H; K; R; T; Y; S; G; F; M; W; V; L; P |
| 199 | H | E; K; R; C; N; T; S; G; M; W; I; V; L; A; P |
| 200 | E | D; R; C; N; T; Y; S; G; F; M; W; I; V; A; P |
| 201 | L | D; E; K; R; N; Q; T; S; G; M; W; I; V; A; P |
| 202 | G | D; E; H; K; R; C; T; Y; S; M; I; V; L; A; P |
| 203 | H | D; E; R; C; N; Q; T; Y; S; G; I; V; L; A; P |
| 204 | S | D; H; K; R; N; Q; T; Y; G; W; I; V; L; A; P |
| 205 | L | D; E; R; C; N; Q; T; S; G; M; W; I; V; A; P |
| 206 | G | D; E; H; R; C; Q; T; S; M; W; I; V; L; A; P |
| 207 | L | D; H; K; R; N; Q; Y; S; G; M; W; I; V; A; P |
| 208 | S | D; E; K; R; C; N; Q; T; G; F; W; V; L; A; P |
| 209 | H | D; R; C; N; Q; T; Y; S; G; F; W; V; L; A; P |
| 210 | S | H; K; R; C; N; Q; T; G; F; W; I; V; L; A; P |
| 211 | T | D; H; K; R; N; Q; S; G; F; M; W; V; L; A; P |
| 212 | D | E; H; K; R; N; Q; T; Y; S; G; F; V; L; A; P |
| 213 | I | D; E; H; K; R; C; N; Q; T; S; G; F; M; V; L; A; P |
| 214 | G | D; E; R; C; Q; T; Y; S; F; M; I; V; L; A; P |
| 215 | A | D; H; K; R; C; N; Q; T; S; G; M; W; I; V; L; P |
| 216 | L | D; E; K; R; C; Q; T; S; G; M; W; I; V; A; P |
| 217 | M | D; H; K; R; C; N; Q; T; Y; S; G; I; L; A; P |
| 218 | Y | D; E; R; C; N; Q; S; G; F; W; I; V; L; A; P |
| 219 | P | D; E; H; K; R; C; Q; T; S; G; F; W; V; L; A |
| 220 | S | E; H; K; R; N; Q; T; G; F; M; I; V; L; A; P |
| 221 | Y | E; K; R; C; N; Q; T; S; G; M; W; V; L; A; P |
| 222 | T | D; H; R; C; N; Y; S; G; F; M; W; I; V; L; A; P |
| 223 | F | E; H; K; R; C; N; Q; T; Y; S; G; M; L; A; P |
| 224 | S | D; H; K; R; C; Q; T; G; M; W; I; V; L; A; P |
| 225 | G | D; E; H; K; R; C; N; Q; T; S; M; W; V; A; P |
| 226 | D | E; H; R; C; N; T; S; G; M; W; I; V; L; A; P |
| 227 | V | D; E; H; K; R; C; Q; T; Y; S; G; W; L; A; P |
| 228 | Q | D; E; H; K; R; N; T; Y; S; G; M; W; L; A; P |
| 229 | L | D; E; H; R; C; Q; T; Y; G; M; W; I; V; A; P |
| 230 | A | D; H; R; C; N; T; Y; S; G; M; W; I; V; L; P |
| 231 | Q | D; H; R; C; Y; S; G; F; M; W; I; V; L; A; P |
| 232 | D | E; H; K; R; N; Q; T; Y; S; G; F; W; V; L; P |
| 233 | D | E; K; R; N; Q; T; S; G; M; W; I; V; L; A; P |
| 234 | I | D; E; H; C; N; Q; T; Y; G; M; W; V; L; A; P |
| 235 | D | E; H; R; C; N; Q; T; Y; S; G; I; V; L; A; P |
| 236 | G | D; E; K; R; C; N; T; Y; S; F; M; I; V; L; P |
| 237 | I | D; E; K; R; C; N; Q; T; Y; S; G; W; L; A; P |
| 238 | Q | E; H; K; R; C; N; T; Y; S; G; F; W; I; L; P |
| 239 | A | D; H; K; R; C; Q; T; Y; S; G; F; W; I; V; L; P |
| 240 | I | D; K; R; C; Q; T; Y; S; G; F; M; V; L; A; P |
| 241 | Y | D; H; R; N; Q; T; S; G; M; W; I; V; L; A; P |
| 242 | G | E; H; K; R; N; T; Y; S; F; W; I; V; L; A; P |
| 243 | R | D; H; K; C; N; Q; T; Y; S; G; I; V; L; A; P |
| 244 | S | D; E; H; R; Q; T; Y; G; F; M; W; V; L; A; P |
| 245 | Q | E; H; K; R; C; T; S; G; F; M; W; I; V; L; P |
| 246 | N | D; K; R; C; Q; T; Y; S; G; F; W; I; V; L; A; P |
| 247 | P | D; E; H; K; R; N; Q; T; S; G; F; I; V; L; A |
| 248 | V | E; H; K; R; C; Q; T; Y; S; G; F; M; W; I; L; A |
| 249 | Q | E; H; K; R; C; N; T; Y; G; W; I; V; L; A; P |
| 250 | P | D; K; R; N; Q; T; Y; S; G; F; M; W; V; L; A |
| 251 | I | D; E; K; R; C; Q; T; Y; S; G; W; V; L; A; P |
| 252 | G | D; E; H; K; R; C; T; S; F; M; W; I; V; L; A; P |
| 253 | P | E; K; R; C; N; Q; T; Y; G; M; W; I; V; L; A |
| 254 | Q | D; E; R; C; T; Y; S; G; F; W; I; V; L; A; P |
| 255 | T | E; H; K; R; C; N; Q; S; G; F; I; V; L; A; P |
| 256 | P | E; K; R; C; N; Q; Y; S; G; F; M; I; V; L; A |
| 257 | K | E; R; C; N; T; S; G; F; M; W; I; V; L; A; P |
| 258 | A | D; E; R; N; Q; T; Y; G; F; M; W; I; V; L; P |

[0340] The additional modification can be an allelic variant or other variant known in the art. Exemplary modifications that can be included in a polypeptide provided herein include, but are not limited to, amino acid replacements corresponding to T4P, Q10P, R30M, R30S, T96R, A114V, F166C, I172V, D181H, R189T, H199A; E200A, G214E, D232N, D233G, R243S, Q254P, I271A, R272A, T286A, 1298T, E314G, F315S, V374M, R386Q, S387T, G391S, and T432A, with reference to positions set forth in SEQ ID NO:2.

[0341] In some examples, additional modifications can confer increased sensitivity to temperature, pH, or other ions, such as monovalent cations (e.g., Na⁺ or K⁺). In particular examples, additional modifications can include modifications that confer temperature sensitivity. For example, MMP polypeptides that are modified to be temperature sensitive exhibit increased activity at a permissive temperature (e.g., 25° C.) compared to non-permissive temperatures (e.g., 34° C. or 37° C.). Exemplary modifications which can render a MMP-1 polypeptide temperature sensitive are set forth in U.S. Publication No. 2010/0284995. For example, modified MMP polypeptides, such as modified MMP-1 polypeptides, that exhibit at least 1.5 times or more activity at a temperature of 25° C. compared to at 34° C. or 37° C. include those that have an amino acid replacement corresponding to any one or more of modifications L95K, D105A, D105F, D105G, D1051, D105L, D105N, D105R, D105S, D105T, D105W, R150P, D151G, F155A, D156K, D156T, D156L, D156A, D156W, D156V, D156H, D156R, G159V, G159T, A176F, D179N, E180Y, E180T, E180F, D181L, D181K, E182T, E182Q, T185R, T185H, T185Q, T185A, T185E, N187R, N187M, N187F, N187K, N1871, R195V, A198L, A198M, G206A, G206S, S210V, Y218S, F223E, V227C, V227E, V227W, Q228P, L229T, L229I, D233E, I234A, I234T, I234E, 1240S, 1240C and C259Q, with reference to positions set forth in SEQ ID NO:2.

[0342] In other examples, additional modifications can confer increased activity of the modified MMP polypeptide compared to the unmodified polypeptide not containing the amino acid replacement. Exemplary modifications which can render a MMP-1 polypeptide temperature sensitive are set forth in U.S. Publication No. 2010/0284995. Exemplary modifications which can render a MMP-1 polypeptide temperature sensitive are set forth in U.S. Publication No. 2010/0284995. For example, modified MMP polypeptides, such as modified MMP-1 polypeptides, having increased activity include those that have an amino acid replacement corresponding to any one or more of modifications N161I, S208K, I213G, G214E, Q228A, Q228D, Q228E, Q228G, Q228H, Q228K, Q228L, Q228M, Q228N, Q228R, Q228S, Q228W, Q228Y, L229V, A230G, A230D, A230S, A230C, A230T, A230M, A230N, A230H, Q231A, Q231D, Q231G, Q231V, Q231S, D232H, D232G, D232P, D232V, D232K, D232W, D232Q, D232E, or D232T, with reference to positions in SEQ ID NO:2

[0343] Other modifications that are or are not in the primary sequence of the polypeptide also can be included in a modified MMP polypeptide, such as a modified MMP-1 polypeptide provided herein. Such additional modifications include posttranslational modifications, such as acetylation, acylation, ADP-ribosylation, amidation, covalent attachment of flavin, covalent attachment of a heme moiety, covalent attachment of a nucleotide or nucleotide derivative, covalent attachment of a lipid or lipid derivative, covalent attachment of a phosphatidylinositol, cross-linking cyclization, disulfide bond formation, demethylation, formation of covalent cross-links, formation of cysteine, formation of pyroglutamate, formylation, gamma-carboxylation, glycosylation, GPI anchor formation, hydroxylation, iodination, methylation, myristoylation, oxidation, proteolytic processing, phosphorylation, prenylation, racemization, selenoylation, or sulfation.

[0344] The modified MMP polypeptides also can be provided for use in the methods as conjugates, whereby the polypeptide is linked, directly or indirectly, to another moiety. The other moiety can be a peptide, protein, polymer, sugar, lipid or toxin. For example, the polymer can a polyethylene glycol (PEG) moiety. In other cases, the polypeptides are linked, directly or indirectly, to a multimerization domain such as an F_{c} domain. For example, such additional modifications can be made to increase the stability or half-life of the protein.

### E. METHODS OF PRODUCING NUCLEIC ACIDS ENCODING csMMPs AND POLYPEPTIDES THEREOF

[0345] Modified csMMP polypeptides set forth herein can be obtained by methods well known in the art for protein purification and recombinant protein expression. Any method known to those of skill in the art for identification of nucleic acids that encode desired genes can be used. Any method available in the art can be used to obtain a full length (i.e., encompassing the entire coding region) cDNA or genomic DNA clone encoding a desired MMP, such as from a cell or tissue source. Modified or modified variant csMMPs, can be engineered from a wild-type polypeptide, such as by site-directed mutagenesis.

[0346] Polypeptides can be cloned or isolated using any available methods known in the art for cloning and isolating nucleic acid molecules. Such methods include PCR amplification of nucleic acids and screening of libraries, including nucleic acid hybridization screening, antibody-based screening and activity-based screening.

[0347] Methods for amplification of nucleic acids can be used to isolate nucleic acid molecules encoding a desired polypeptide, including for example, polymerase chain reaction (PCR) methods. A nucleic acid-containing material can be used as a starting material from which a desired polypeptide-encoding nucleic acid molecule can be isolated. For example, DNA and mRNA preparations, cell extracts, tissue extracts, fluid samples (e.g., blood, serum, saliva), or samples from healthy and/or diseased subjects can be used in amplification methods. Nucleic acid libraries also can be used as a source of starting material. Primers can be designed to amplify a desired polypeptide. For example, primers can be designed based on expressed sequences from which a desired polypeptide is generated. Primers can be designed based on back-translation of a polypeptide amino acid sequence. Nucleic acid molecules generated by amplification can be sequenced and confirmed to encode a desired polypeptide.

[0348] Additional nucleotide sequences can be joined to a polypeptide-encoding nucleic acid molecule, including linker sequences containing restriction endonuclease sites for the purpose of cloning the synthetic gene into a vector, for example, a protein expression vector or a vector designed for the amplification of the core protein coding DNA sequences. Furthermore, additional nucleotide sequences specifying functional DNA elements can be operatively linked to a polypeptide-encoding nucleic acid molecule. Examples of such sequences include, but are not limited to, promoter sequences designed to facilitate intracellular protein expression, and secretion sequences, for example heterologous signal sequences, designed to facilitate protein secretion. Such sequences are known to those of skill in the art. For example, exemplary heterologous signal sequences include, but are not limited to, human kappa IgG heterologous signal sequence set forth in SEQ ID NO:92. For bacterial expression, and exemplary heterologous signal sequence is the pelB leader sequence, for example, as set forth in SEQ ID NO:130. Additional nucleotide residues sequences, such as sequences of bases specifying protein binding regions, also can be linked to enzyme-encoding nucleic acid molecules. Such regions include, but are not limited to, sequences of residues that facilitate or encode proteins that facilitate uptake of an enzyme into specific target cells, or otherwise alter pharmacokinetics of a product of a synthetic gene. For example, enzymes can be linked to PEG moieties.

[0349] In addition, tags or other moieties can be added, for example, to aid in detection or affinity purification of the polypeptide. For example, additional nucleotide residues sequences, such as sequences of bases specifying an epitope tag or other detectable marker, also can be linked to enzyme-encoding nucleic acid molecules. Exemplary of such sequences include nucleic acid sequences encoding a His tag (e.g., 6×His, HHHHHH; SEQ ID NO:89) or Flag Tag (DYKDDDDK; SEQ ID NO:91).

[0350] The identified and isolated nucleic acids can then be inserted into an appropriate cloning vector. A large number of vector-host systems known in the art can be used. Possible vectors include, but are not limited to, plasmids or modified viruses, but the vector system must be compatible with the host cell used. Such vectors include, but are not limited to, bacteriophages such as lambda derivatives, or plasmids such as pCMV4, pBR322 or pUC plasmid derivatives or the Bluescript vector (Stratagene, La Jolla, Calif.). Other expression vectors include the pET303CTHis (SEQ ID NO:90; Invitrogen, CA) or pET-26B (SEQ ID NO:131) expression vector exemplified herein. The insertion into a cloning vector can, for example, be accomplished by ligating the DNA fragment into a cloning vector which has complementary cohesive termini. Insertion can be effected using TOPO cloning vectors (Invitrogen, Carlsbad, Calif.). If the complementary restriction sites used to fragment the DNA are not present in the cloning vector, the ends of the DNA molecules can be enzymatically modified. Alternatively, any site desired can be produced by ligating nucleotide sequences (linkers) onto the DNA termini; these ligated linkers can contain specific chemically synthesized oligonucleotides encoding restriction endonuclease recognition sequences. In an alternative method, the cleaved vector and protein gene can be modified by homopolymeric tailing. Recombinant molecules can be introduced into host cells via, for example, transformation, transfection, infection, electroporation and sonoporation, so that many copies of the gene sequence are generated.

[0351] In specific embodiments, transformation of host cells with recombinant DNA molecules that incorporate the isolated protein gene, cDNA, or synthesized DNA sequence enables generation of multiple copies of the gene. Thus, the gene can be obtained in large quantities by growing transformants, isolating the recombinant DNA molecules from the transformants and, when necessary, retrieving the inserted gene from the isolated recombinant DNA.

[0352] 1. Vectors and Cells

[0353] For recombinant expression of one or more of the desired proteins, such as any described herein, the nucleic acid containing all or a portion of the nucleotide sequence encoding the protein can be inserted into an appropriate expression vector, i.e., a vector that contains the necessary elements for the transcription and translation of the inserted protein coding sequence. The necessary transcriptional and translational signals also can be supplied by the native promoter for enzyme genes, and/or their flanking regions.

[0354] Vectors containing nucleic acid encoding a modified csMMP polypeptide can be introduced into a cell, including a prokaryotic or eukaryotic cell for protein production. Such cells include bacterial cells, yeast cells, fungal cells, Archea, plant cells, insect cells and animal cells. For example, the expression vector can be expressed in an animal cell that is an endothelial cell. The cells are used to produce a protein thereof by growing the above-described cells under conditions whereby the encoded protein is expressed by the cell, and recovering the expressed protein. Vectors can be selected for expression of the enzyme protein in a cell such that the enzyme protein is retained within the cell or secreted into the culture medium. For purposes herein, for example, the enzyme can be secreted into the medium.

[0355] The proenzyme (i.e., zymogen) form of the enzyme can be purified for use as a calcium-dependent, conditionally-active enzyme. Alternatively, upon secretion, the propeptide can be cleaved by chemical agents or catalytically or autocatalytically to generate a mature enzyme by the use of a processing agent. This processing step can be performed during the purification step and/or immediately before use of the enzyme. If desired, the processing agent can be dialyzed away or otherwise purified away from the purified protein before use. Additionally, if necessary, the enzyme can be purified such that the cleaved propeptide is removed from the preparation.

[0356] A variety of host-vector systems can be used to express the protein coding sequence. These include, but are not limited to, mammalian cell systems transfected with plasmid DNA or infected with virus (e.g., vaccinia virus, adenovirus and other viruses); insect cell systems infected with virus (e.g., baculovirus); microorganisms such as yeast containing yeast vectors; or bacteria transformed with bacteriophage, DNA, plasmid DNA, or cosmid DNA. The expression elements of vectors vary in their strengths and specificities. Depending on the host-vector system used, any one of a number of suitable transcription and translation elements can be used.

[0357] Any methods known to those of skill in the art for the insertion of DNA fragments into a vector can be used to construct expression vectors containing a chimeric gene containing appropriate transcriptional/translational control signals and protein coding sequences. These methods can include in vitro recombinant DNA and synthetic techniques and in vivo recombinants (genetic recombination). Expression of nucleic acid sequences encoding protein, or domains, derivatives, fragments or homologs thereof, can be regulated by a second nucleic acid sequence so that the genes or fragments thereof are expressed in a host transformed with the recombinant DNA molecule(s). For example, expression of the proteins can be controlled by any promoter/enhancer known in the art. In a specific embodiment, the promoter is not native to the genes for a desired protein. Promoters which can be used include, but are not limited to, the SV40 early promoter (Bemoist and Chambon (1981) Nature 290:304-310), the promoter contained in the 3′ long terminal repeat of Rous sarcoma virus (Yamamoto et al. (1980) Cell 22:787-797), the herpes thymidine kinase promoter (Wagner et al. (1981) Proc. Natl. Acad. Sci. U.S.A. 78:1441-1445), the regulatory sequences of the metallothionein gene (Brinster et al. (1982) Nature 296:39-42); prokaryotic expression vectors such as the β-lactamase promoter (Jay et al. (1981) Proc. Natl. Acad. Sci. U.S.A. 78:5543) or the tac promoter (DeBoer et al. (1983) Proc. Natl. Acad. Sci. U.S.A. 80:21-25); see also Gilbert and VIIIa-Komaroff, “Useful Proteins from Recombinant Bacteria,” Sci. Am. (1980) 242:74-94; plant expression vectors containing the nopaline synthase promoter (Herrera-Estrella et al. (1984) Nature 303:209-213) or the cauliflower mosaic virus 35S RNA promoter (Gardner et al. (1981) Nucleic Acids Res. 9:2871), and the promoter of the photosynthetic enzyme ribulose bisphosphate carboxylase (Herrera-Estrella et al. (1984) Nature 310:115-120); promoter elements from yeast and other fungi such as the Gal4 promoter, the alcohol dehydrogenase promoter, the phosphoglycerol kinase promoter, the alkaline phosphatase promoter, and the following animal transcriptional control regions that exhibit tissue specificity and have been used in transgenic animals: elastase I gene control region which is active in pancreatic acinar cells (Swift et al. (1984) Cell 38:639-646; Ornitz et al. (1986) Cold Spring Harbor Symp. Quant. Biol. 50:399-409; MacDonald (1987) Hepatol. 7:425-515); insulin gene control region which is active in pancreatic beta cells (Hanahan et al. (1985) Nature 315:115-122), immunoglobulin gene control region which is active in lymphoid cells (Grosschedl et al. (1984) Cell 38:647-658; Adams et al. (1985) Nature 318:533-538; Alexander et al. (1987) Mol. Cell. Biol. 7:1436-1444), mouse mammary tumor virus control region which is active in testicular, breast, lymphoid and mast cells (Leder et al. (1986) Cell 45:485-495), albumin gene control region which is active in liver (Pinkert et al. (1987) Genes Dev. 1:268-276), alpha-fetoprotein gene control region which is active in liver (Krumlauf et al. (1985) Mol. Cell. Biol. 5:1639-1648; Hammer et al. (1987) Science 235:53-58), alpha-1 antitrypsin gene control region which is active in liver (Kelsey et al. (1987) Genes Dev. 1:161-171), beta globin gene control region which is active in myeloid cells (Magram et al. (1985) Nature 315:338-340; Kollias et al. (1986) Cell 46:89-94), myelin basic protein gene control region which is active in oligodendrocyte cells of the brain (Readhead et al. (1987) Cell 48:703-712), myosin light chain-2 gene control region which is active in skeletal muscle (Shani (1985) Nature 314:283-286), and gonadotrophic releasing hormone gene control region which is active in gonadotrophs of the hypothalamus (Mason et al. (1986) Science 234:1372-1378).

[0358] In a specific embodiment, a vector is used that contains a promoter operably linked to nucleic acids encoding a desired protein, or a domain, fragment, derivative or homolog thereof, one or more origins of replication, and optionally, one or more selectable markers (e.g., an antibiotic resistance gene). Exemplary plasmid vectors for transformation of E. coli cells include, for example, the pQE expression vectors (available from Qiagen, Valencia, Calif.; see also literature published by Qiagen describing the system). pQE vectors have a phage T5 promoter (recognized by E. coli RNA polymerase) and a double lac operator repression module to provide tightly regulated, high-level expression of recombinant proteins in E. coli, a synthetic ribosomal binding site (RBS II) for efficient translation, a 6×His tag coding sequence, t₀ and T1 transcriptional terminators, ColE1 origin of replication, and a beta-lactamase gene for conferring ampicillin resistance. The pQE vectors enable placement of a 6×His tag at either the N- or C-terminus of the recombinant protein. Such plasmids include pQE 32, pQE 30, and pQE 31 which provide multiple cloning sites for all three reading frames and provide for the expression of N-terminally 6×His-tagged proteins. Other exemplary plasmid vectors for transformation of E. coli cells include, for example, the pET expression vectors (see e.g., U.S. Pat. No. 4,952,496; available from Novagen, Madison, Wis.; see also literature published by Novagen describing the system). Such plasmids include pET 11a, which contains the T7lac promoter, T7 terminator, the inducible E. coli lac operator, and the lac repressor gene; pET 12a-c, which contains the T7 promoter, T7 terminator, and the E. coli ompT secretion signal; and pET 15b and pET19b (Novagen, Madison, Wis.), which contain a His-Tag™ leader sequence for use in purification with a His column and a thrombin cleavage site that permits cleavage following purification over the column, the T7-lac promoter region and the T7 terminator, and pET-26B (SEQ ID NO:131). An additional pET vector is pET303CTHis (set forth in SEQ ID NO:90; Invitrogen, CA), which contains a T7lac promoter, T7 terminator, the inducible E. coli lac operator, a beta-lactamase gene for conferring ampicillin resistance, and also a His-Tag sequence for use in purification.

[0359] Exemplary of a vector for mammalian cell expression is the HZ24 expression vector. The HZ24 expression vector was derived from the pCI vector backbone (Promega). It contains DNA encoding the beta-lactamase resistance gene (AmpR), an F1 origin of replication, a cytomegalovirus immediate-early enhancer/promoter region (CMV), and an SV40 late polyadenylation signal (SV40). The expression vector also has an internal ribosome entry site (IRES) from the ECMV virus (Clontech) and the mouse dihydrofolate reductase (DHFR) gene.

[0360] 2. Expression

[0361] Modified csMMP polypeptides can be produced by any method known to those of skill in the art including in vivo and in vitro methods. Desired proteins can be expressed in any organism suitable to produce the required amounts and forms of the proteins, such as for example, needed for administration and treatment. Expression hosts include prokaryotic and eukaryotic organisms such as E. coli, yeast, plants, insect cells, mammalian cells, including human cell lines and transgenic animals. Expression hosts can differ in their protein production levels as well as the types of post-translational modifications that are present on the expressed proteins. The choice of expression host can be made based on these and other factors, such as regulatory and safety considerations, production costs and the need and methods for purification.

[0362] Many expression vectors are available and known to those of skill in the art and can be used for expression of proteins. The choice of expression vector will be influenced by the choice of host expression system. In general, expression vectors can include transcriptional promoters and optionally enhancers, translational signals, and transcriptional and translational termination signals. Expression vectors that are used for stable transformation typically have a selectable marker which allows selection and maintenance of the transformed cells. In some cases, an origin of replication can be used to amplify the copy number of the vector.

[0363] Modified csMMP polypeptides also can be utilized or expressed as protein fusions. For example, an enzyme fusion can be generated to add additional functionality to an enzyme. Examples of enzyme fusion proteins include, but are not limited to, fusions of a signal sequence, a tag such as for localization, e.g., a His₆ tag or a myc tag, or a tag for purification, for example, a GST fusion, and a sequence for directing protein secretion and/or membrane association.

[0364] Generally, modified csMMP polypeptides are expressed in an inactive zymogen form. Zymogen conversion can be achieved by exposure to chemical agents, to other proteases or to autocatalysis to generate a mature enzyme as described elsewhere herein. Any form of an enzyme is contemplated herein. It is understood that, if provided and expressed in a zymogen form, that it is processed to yield a mature polypeptide prior to use by a processing agent.

[0365] a. Prokaryotic Cells

[0366] Prokaryotes, especially E. coli, provide a system for producing large amounts of proteins. Transformation of E. coli is a simple and rapid technique well known to those of skill in the art. Expression vectors for E. coli can contain inducible promoters. Such promoters are useful for inducing high levels of protein expression and for expressing proteins that exhibit some toxicity to the host cells. Examples of inducible promoters include the lac promoter, the trp promoter, the hybrid tac promoter, the T7 and SP6 RNA promoters and the temperature regulated λPL promoter.

[0367] Proteins, such as any provided herein, can be expressed in the cytoplasmic environment of E. coli. The cytoplasm is a reducing environment and for some molecules, this can result in the formation of insoluble inclusion bodies. Reducing agents such as dithiothreitol and β-mercaptoethanol and denaturants, such as guanidine-HCl and urea can be used to re-solubilize the proteins. An alternative approach is the expression of proteins in the periplasmic space of bacteria which provides an oxidizing environment and chaperonin-like and disulfide isomerases and can lead to the production of soluble protein. Typically, a leader sequence is fused to the protein to be expressed which directs the protein to the periplasm. The leader is then removed by signal peptidases inside the periplasm. Examples of periplasmic-targeting leader sequences include the pelB leader (SEQ ID NO:130) from the pectate lyase gene and the leader derived from the alkaline phosphatase gene. In some cases, periplasmic expression allows leakage of the expressed protein into the culture medium. The secretion of proteins allows quick and simple purification from the culture supernatant. Proteins that are not secreted can be obtained from the periplasm—by osmotic lysis. Similar to cytoplasmic expression, in some cases proteins can become insoluble and denaturants and reducing agents can be used to facilitate solubilization and refolding. Temperature of induction and growth also can influence expression levels and solubility, typically temperatures between 25° C. and 37° C. are used. Typically, bacteria produce aglycosylated proteins. Thus, if proteins require glycosylation for function, glycosylation can be added in vitro after purification from host cells.

[0368] b. Yeast Cells

[0369] Yeasts such as Saccharomyces cerevisae, Schizosaccharomyces pombe, Yarrowia lipolytica, Kluyveromyces lactis and Pichia pastoris are well known yeast expression hosts that can be used for production of proteins, such as any described herein. Yeast can be transformed with episomal replicating vectors or by stable chromosomal integration by homologous recombination. Typically, inducible promoters are used to regulate gene expression. Examples of such promoters include GAL1, GAL7 and GALS and metallothionein promoters, such as CUP1, AOX1 or other Pichia or other yeast promoter. Expression vectors often include a selectable marker such as LEU2, TRP1, HIS3 and URA3 for selection and maintenance of the transformed DNA. Proteins expressed in yeast are often soluble. Co-expression with chaperonins such as Bip and protein disulfide isomerase can improve expression levels and solubility. Additionally, proteins expressed in yeast can be directed for secretion using secretion signal peptide fusions such as the yeast mating type alpha-factor secretion signal from Saccharomyces cerevisae and fusions with yeast cell surface proteins such as the Aga2p mating adhesion receptor or the Arxula adeninivorans glucoamylase. A protease cleavage site, such as for the Kex-2 protease, can be engineered to remove the fused sequences from the expressed polypeptides as they exit the secretion pathway. Yeast also is capable of glycosylation at Asn-X-Ser/Thr motifs.

[0370] c. Insect Cells

[0371] Insect cells, particularly using baculovirus expression, are useful for expressing polypeptides such as matrix-degrading enzymes. Insect cells express high levels of protein and are capable of most of the post-translational modifications used by higher eukaryotes. Baculovirus have a restrictive host range which improves the safety and reduces regulatory concerns of eukaryotic expression. Typical expression vectors use a promoter for high level expression such as the polyhedrin promoter of baculovirus. Commonly used baculovirus systems include the baculoviruses such as Autographa californica nuclear polyhedrosis virus (AcNPV), and the bombyx mori nuclear polyhedrosis virus (BmNPV) and an insect cell line such as Sf9 derived from Spodoptera frugiperda, Pseudaletia unipuncta (A7S) and Danaus plexippus (DpN1). For high-level expression, the nucleotide sequence of the molecule to be expressed is fused immediately downstream of the polyhedrin initiation codon of the virus. Mammalian secretion signals are accurately processed in insect cells and can be used to secrete the expressed protein into the culture medium. In addition, the cell lines Pseudaletia unipuncta (A7S) and Danaus plexippus (DpN1) produce proteins with glycosylation patterns similar to mammalian cell systems.

[0372] An alternative expression system in insect cells is the use of stably transformed cells. Cell lines such as the Schnieder 2 (S2) and Kc cells (Drosophila melanogaster) and C7 cells (Aedes albopictus) can be used for expression. The Drosophila metallothionein promoter can be used to induce high levels of expression in the presence of heavy metal induction with cadmium or copper. Expression vectors are typically maintained by the use of selectable markers such as neomycin and hygromycin.

[0373] d. Mammalian Cells

[0374] Mammalian expression systems can be used to express proteins including csMMPs. Expression constructs can be transferred to mammalian cells by viral infection such as by adenovirus, or by direct DNA transfer such as by liposomes, calcium phosphate, DEAE-dextran and by physical means such as electroporation and microinjection. Expression vectors for mammalian cells typically include an mRNA cap site, a TATA box, a translational initiation sequence (Kozak consensus sequence) and polyadenylation elements. IRES elements also can be added to permit bicistronic expression with another gene, such as a selectable marker. Such vectors often include transcriptional promoter-enhancers for high-level expression, for example the SV40 promoter-enhancer, the human cytomegalovirus (CMV) promoter and the long terminal repeat of Rous sarcoma virus (RSV). These promoter-enhancers are active in many cell types. Tissue and cell-type promoters and enhancer regions also can be used for expression. Exemplary promoter/enhancer regions include, but are not limited to, those from genes such as elastase I, insulin, immunoglobulin, mouse mammary tumor virus, albumin, alpha fetoprotein, alpha 1 antitrypsin, beta globin, myelin basic protein, myosin light chain 2, and gonadotropic releasing hormone gene control. Selectable markers can be used to select for and maintain cells with the expression construct. Examples of selectable marker genes include, but are not limited to, hygromycin B phosphotransferase, adenosine deaminase, xanthine-guanine phosphoribosyl transferase, aminoglycoside phosphotransferase, dihydrofolate reductase (DHFR) and thymidine kinase. For example, expression can be performed in the presence of methotrexate to select for only those cells expressing the DHFR gene. Fusion with cell surface signaling molecules such as TCR-ζ and Fc_{ε}RI-γ can direct expression of the proteins in an active state on the cell surface.

[0375] Many cell lines are available for mammalian expression including mouse, rat human, monkey, chicken and hamster cells. Exemplary cell lines include but are not limited to CHO, Balb/3T3, HeLa, MT2, mouse NS0 (nonsecreting) and other myeloma cell lines, hybridoma and heterohybridoma cell lines, lymphocytes, fibroblasts, Sp2/0, COS, NIH3T3, HEK293, 293S, 2B8, and HKB cells. Cell lines also are available adapted to serum-free media which facilitates purification of secreted proteins from the cell culture media. Examples include CHO-S cells (Invitrogen, Carlsbad, Calif., cat #11619-012) and the serum free EBNA-1 cell line (Pham et al. (2003) Biotechnol. Bioeng. 84:332-42). Cell lines also are available that are adapted to grow in special mediums optimized for maximal expression. For example, DG44 CHO cells are adapted to grow in suspension culture in a chemically defined, animal product-free medium.

[0376] e. Plants

[0377] Transgenic plant cells and plants can be used to express proteins such as any described herein. Expression constructs are typically transferred to plants using direct DNA transfer such as microprojectile bombardment and PEG-mediated transfer into protoplasts, and with Agrobacterium-mediated transformation. Expression vectors can include promoter and enhancer sequences, transcriptional termination elements and translational control elements. Expression vectors and transformation techniques are usually divided between dicot hosts, such as Arabidopsis and tobacco, and monocot hosts, such as corn and rice. Examples of plant promoters used for expression include the cauliflower mosaic virus promoter, the nopaline synthase promoter, the ribose bisphosphate carboxylase promoter and the ubiquitin and UBQ3 promoters.

[0378] Selectable markers such as hygromycin, phosphomannose isomerase and neomycin phosphotransferase are often used to facilitate selection and maintenance of transformed cells. Transformed plant cells can be maintained in culture as cells, aggregates (callus tissue) or regenerated into whole plants. Transgenic plant cells also can include algae engineered to produce matrix-degrading enzymes. Because plants have different glycosylation patterns than mammalian cells, this can influence the choice of protein produced in these hosts.

[0379] 3. Purification Techniques

[0380] Methods for purification of polypeptides, including modified csMMP polypeptides, from host cells will depend on the chosen host cells and expression systems. For secreted molecules, proteins generally are purified from the culture media after removing the cells. For intracellular expression, cells can be lysed and the proteins purified from the extract. When transgenic organisms such as transgenic plants and animals are used for expression, tissues or organs can be used as starting material to make a lysed cell extract. Additionally, transgenic animal production can include the production of polypeptides in milk or eggs, which can be collected, and if necessary, the proteins can be extracted and further purified using standard methods in the art. If there are free cysteines, these can be replaced with other amino acids, such as serine. Replacement of free cysteines can prevent unwanted aggregation.

[0381] Generally, modified csMMP polypeptides are expressed and purified to be in an inactive form (zymogen form) for subsequent activation as described in the systems and methods provided herein. Hence, following expression, mature forms can be generated by the use of a processing agent and chemical modification, catalysis and/or autocatalysis to remove the inactivating propeptide. Generally, a processing agent is chosen that is acceptable for administration to a subject. If necessary, additional purification steps can be performed to remove the processing agent from the purified preparation. In addition, if necessary, additional purification steps can be performed to remove the propeptide from the purified preparation. Activation can be monitored by SDS-PAGE (e.g., a 3 kilodalton shift) and by enzyme activity (cleavage of a fluorogenic substrate). Where an active enzyme is desired, typically, an enzyme is allowed to achieve >75% activation before purification. Typically, MMPs are rendered active by activation cleavage removing the propeptide or prosegment to generate a mature enzyme from a zymogen form. In some applications, for example in the presence of low calcium concentrations, csMMPs are inactive in their mature form until exposure to the requisite calcium concentration as described herein. For example, many MMPs provided herein are not active or are substantially inactive at low calcium concentrations (e.g., 1 mM Ca²⁺).

[0382] Proteins, such as modified csMMP polypeptides, can be purified using standard protein purification techniques known in the art including, but not limited to, SDS-PAGE, size fraction and size exclusion chromatography, ammonium sulfate precipitation and ionic exchange chromatography, such as anion exchange. Affinity purification techniques also can be utilized to improve the efficiency and purity of the preparations. For example, antibodies, receptors and other molecules that bind MMPs can be used in affinity purification. Expression constructs also can be engineered to add an affinity tag to a protein such as a myc epitope, GST fusion or His₆ and affinity purified with myc antibody, glutathione resin and Ni-resin, respectively. Purity can be assessed by any method known in the art including gel electrophoresis and staining and spectrophotometric techniques.

[0383] 4. Methods of Activation

[0384] MMPs require processing for activation. Generally, processing involves removal of the propeptide and/or conformational changes of the enzyme to generate a processed mature form. Processing of the enzyme by removal of the propeptide is required for activity of MMPs. For normal MMPs (e.g., wild-type) that are not conditionally active as provided herein, the processed mature form is an active enzyme. Thus, it is understood that wild-type MMPs in their processed mature form are enzymatically active, and thus for these enzymes this is the active form. csMMPs provided herein, however, also additionally require the presence of sufficient calcium to be fully active.

[0385] Processing (and thereby activation) can be induced by processing agents such as proteases, including other previously activated MMPs; by chemical activation, such as thiol-modifying agents (4-aminophenylmercuric acetate, HgCl₂ and N-ethylmaleimide), oxidized glutathione, SDS, chaotropic agents and reactive oxygens; and by low pH or heat treatment. For example, Table 8 below lists exemplary processing agents (see also Visse et al. (2003) Circ. Res. 92:827-839; Khan et al. (1998) Protein Science 7:815-836; Okada et al. (1988) Biochem. J. 254:731-741; Okada & Nakanashi (1989) FEBS Lett. 249:353-356; Nagase et al. (1990) Biochemistry 29:5783-5789; Koklitis et al. (1991) Biochem. J. 276:217-221; Springman et al. (1990) PNAS 87:364-368; Murphy et al. (1997) Matrix Biol. 15:511-518).

TABLE 8
Zymogen Activators (i.e., processing agents)
Proteolytic Compounds

| | |
|---|---|
| Proteases | Plasmin |
| | Plasma kallikrein |
| | Trypsin-1 (Trypsin I) |
| | Trypsin-2 (Trypsin II) |
| | Neutrophil elastase |
| | Cathepsin G |
| | Tryptase |
| | Chymase |
| | Proteinase-3 |
| | Furin |
| | uPA |
| | MMPs, including MMP-1, MMP-2, MMP-3, |
| | MMP-7, MMP-10, MMP-26, and MT1-MMP |

Non-Proteolytic Compounds

| | |
|---|---|
| Thiol-modifying Agents | 4-aminophenylmercuric acetate (APMA) |
| | HgCl₂ |
| | N-ethylmaleimide |
| Conformational | Sodium dodecyl sulfate (SDS) |
| Perturbants | Chaotropic agents |
| Other Chemical Agents | Oxidized glutathione (GSSG) |
| | Reactive oxygen |
| | Au(I) salts |

Other Activating Conditions

Acidic pH
Heat

[0386] MMP activation occurs in a stepwise manner. For example, activation by proteases involves a first proteolytic attack of a bait region (corresponding to amino acids 32-38 of proMMP-1 (SEQ ID NO:2)), an exposed loop region found between the first and second helices of the pro-peptide. The sequence of the bait region confers cleavage specificity. Following initial cleavage, the remaining propeptide is destabilized allowing for intermolecular processing by other partially active MMP intermediates or active MMPs. For example, the protease plasmin activates both proMMP-1 and proMMP-3. Once activated, MMP-3 effects the final activation of proMMP-1. Alternatively, activation by chemicals, for example APMA, initially causes the modification of the propeptide cysteine residue, which in turn causes partial activation and intramolecular cleavage of the propeptide. The remaining segment of propeptide is then processed by other proteases or MMPs.

### F. PHARMACEUTICAL COMPOSITIONS, DOSAGES AND FORMULATIONS

[0387] The methods provided herein utilize pharmaceutical compositions that contain csMMP polypeptides, such as any described in Section D above. Pharmaceutically acceptable compositions are prepared in view of approvals for a regulatory agency or other agency prepared in accordance with generally recognized pharmacopeia for use in animals and in humans. Typically, the compounds are formulated into pharmaceutical compositions using techniques and procedures well known in the art (see e.g., Ansel, Introduction to Pharmaceutical Dosage Forms, Fourth Edition, 1985, p. 126).

[0388] 1. Compositions for Conditional Activity

[0389] The calcium-sensitive MMPs used in the methods provided herein require the presence of sufficient calcium concentrations for activity. Thus, compositions containing a modified MMP polypeptide, such as any of the csMMP polypeptides described herein in Section D, can be provided that expose the csMMP to the calcium concentrations required for activation. Exposure of the csMMP to calcium can take place in vitro or in vivo. The csMMPs can be exposed to calcium prior to, simultaneously with, subsequent to, or intermittently upon in vivo administration. For example, the modified MMP polypeptide can be administered as a composition that contains higher than physiological calcium concentrations. In other examples, a calcium-containing formulation that contains higher than physiological calcium concentrations can be administered separately from the modified MMP polypeptide, such as prior to, simultaneously with, subsequent to, or intermittently upon in vivo administration of the modified MMP polypeptide.

[0390] The calcium ions in the modified MMP compositions or calcium-containing formulations can be any calcium-containing salt that is well-tolerated upon administration to a patient. For example, the modified MMP compositions or calcium-containing formulation can include calcium chloride, calcium phosphate, calcium pyruvate, calcium gluconate, calcium lactate, calcium citrate, calcium acetate, calcium disodium versenate, or other sources of calcium ions, or combinations thereof. In some examples, a calcium salt is dissolved in a buffer or other liquid. Typically, calcium chloride is used to increase the calcium concentration in a composition containing a modified MMP or other calcium-containing formulations.

[0391] The effected duration of csMMP activation depends on the calcium concentration local to the enzyme. Thus, csMMP activation is flexible and can be adapted to the particular enzyme that is used, the disease or condition being treated, the site of administration, or other factors. For example, csMMP activity can be regulated by the concentration of calcium in the csMMP-containing formulation that is initially administered, the concentration of calcium in a formulation that is administered simultaneously with or subsequent to csMMP administration, and the frequency and concentration of calcium of additionally administered calcium-containing formulations. It is within the level of the skilled artisan to determine the amount of calcium in a MMP composition and/or the amount or frequency of administration of a calcium-containing formulation to regulate the activity of the csMMP.

[0392] For example, the modified MMP compositions or calcium-containing formulations can contain calcium in a concentration that is greater than physiological calcium levels (e.g., 1-1.3 mM). In particular, the concentration of calcium in the compositions or formulations is greater than 1.5 mM and generally between or about between 2 mM to 100 mM, and typically 5 mM to 20 mM. For example, the concentration of calcium is at least or about at least 2 mM, 3 mM, 4 mM, 5 mM, 6 mM, 7 mM, 8 mM, 9 mM, 10 mM, 15 mM, 20 mM, 25 mM, 50 mM, 100 mM or greater than 100 mM. The calcium-containing formulation, for example, a buffer or liquid, can be provided in the same composition as the csMMP or in a separate composition. When provided separately, it can be administered prior to, simultaneously with, subsequent to, or intermittently with the csMMP.

[0393] Hence, where the csMMP requires calcium concentrations that are greater than physiological calcium levels (e.g., 1-1.3 mM), the csMMP is provided in and/or exposed to a calcium-containing formulation that, upon administration of the modified MMP, results in an extracellular calcium concentration at the local site of administration of at least or about at least 2 mM, 3 mM, 4 mM, 5 mM, 6 mM, 7 mM, 8 mM, 9 mM, 10 mM, 15 mM, 20 mM, 25 mM, 50 mM, 100 mM or greater than 100 mM. Upon administration in vivo where the physiologic extracellular Ca²⁺ concentration is at or about 1-1.3 mM Ca²⁺, the Ca²⁺ concentration will decrease in the local environment of the csMMP as the Ca²⁺ ions dissipate, thereby resulting in inactivation, or substantial inactivation, of the csMMP and temporal control thereof (which could occur immediately or almost immediately, depending on the starting calcium concentration of the composition administered). One of skill in the art can empirically determine the length of time required for application depending on the particular target depth of the tissue that is being treated, the particular enzyme that is being used, and other factors based on known testing protocols or extrapolation from in vivo or in vitro test data. In addition, one of skill in the art can empirically determine the amount of Ca²⁺ to administer to achieve csMMP activation for a predetermined length of time.

[0394] The csMMP polypeptides for use in the methods provided herein also can be prepared in compositions containing other requisite metals required for activity. For example, MMP polypeptides are Zn-dependent in addition to being Ca-dependent. It is within the level of one of skill in the art to empirically determine the optimal concentration of zinc and calcium required for activity. The optimal concentration of zinc and calcium is a concentration that maintains the calcium-sensitive phenotype of the csMMP. For example, the optimal concentration of ZnCl₂ in the MMP compositions provided herein is typically less than 0.01 mM, for example, 0.0005 mM to 0.009 mM, and in particular 0.0005 mM to 0.005 mM, for example 0.001 mM. Other metals also can be included in the compositions as required for activity.

[0395] The compositions and formulations generally also contain salt (e.g., NaCl), which can provide stabilizing effects on the enzyme. The pharmaceutical compositions or formulations provided herein are prepared in accordance with the requirements of the active agent(s). It is within the level of one of skill in the art to assess the stability of the active agent(s) in the formulation. In particular examples herein, the pharmaceutical compositions contain NaCl at a concentration of between or about between 10 mM to 200 mM, such as 10 mM to 50 mM, 50 mM to 200 mM, 50 mM to 120 mM, 50 mM to 100 mM, 50 mM to 90 mM, 120 mM to 160 mM, 130 mM to 150 mM, 80 mM to 140 mM, 80 mM to 120 mM, 80 mM to 100 mM, 80 mM to 160 mM, 100 mM to 140 mM, 120 mM to 120 mM or 140 mM to 180 mM.

[0396] The pharmaceutical compositions also are prepared at a pH of between or about between 6.0 to 8.0, such as between or about between 6.5 to 7.8, 6.5 to 7.2, 7.0 to 7.8, 7.0 to 7.6 or 7.2 to 7.4, and generally at a pH of about 7.5. Reference to pH herein is based on measurement of pH at room temperature. It is understood that the pH can change based on temperature, exposure to other components and other conditions. For example, the pH can vary by ±0.1, 0.2, 0.3, 0.4, 0.5, 0.6, 0.7, 0.8, 0.9, 1.0, 1.2, 1.3, 1.4, 1.5 or more. If necessary, pH can be adjusted using acidifying agents to lower the pH or alkalizing agents to increase the pH. Exemplary acidifying agents include, but are not limited to, acetic acid, citric acid, sulfuric acid, hydrochloric acid, monobasic sodium phosphate solution, and phosphoric acid. Exemplary alkalizing agents include, but are not limited to, dibasic sodium phosphate solution, sodium carbonate, or sodium hydroxide. The compositions are generally prepared using a buffering agent that maintains the pH range.

[0397] The compositions are generally prepared using a buffering agent that does not interfere or interact with the calcium ions. For example, generally phosphate buffers are not utilized, since calcium precipitates as calcium phosphate in phosphate buffers. In addition, citrate is a known calcium chelator and thus citrate buffers generally are not utilized as buffers in compositions herein. Examples of particularly suitable buffers include Tris, succinate, acetate, aconitate, malate and carbonate. Those of skill in the art, however, will recognize that formulations provided herein are not limited to a particular buffer, so long as the buffer maintains the calcium concentration and provides an acceptable degree of pH stability, or “buffer capacity” in the range indicated. Generally, a buffer has an adequate buffer capacity within about 1 pH unit of its pK (Lachman et al. in: The Theory and Practice of Industrial Pharmacy, 3rd Edn. (Lachman, L., Lieberman, HA. and Kanig, J. L., Eds.), Lea and Febiger, Philadelphia, p. 458-460, 1986). Buffer suitability can be estimated based on published pK tabulations or can be determined empirically by methods well known in the art. The pH of the solution can be adjusted to the desired endpoint using any acceptable acid or base.

[0398] Buffers that can be included in the co-formulations provided herein include, but are not limited to, Tris (Tromethamine) or histidine buffers. Such buffering agents can be present in the compositions or formulations at concentrations between or about between 1 mM to 100 mM, such as at least or about at least 10 mM to 50 mM or 20 mM to 40 mM, such as at or about or at least 50 mM. For example, such buffering agents can be present in the compositions or formulations in a concentration of at least or about at least 1 mM, 2 mM, 3 mM, 4 mM, 5 mM, 6 mM, 7 mM, 8 mM, 9 mM, 10 mM, 11 mM, 12 mM, 13 mM, 14 mM, 15 mM, 16 mM, 17 mM, 18 mM, 19 mM, 20 mM, 25 mM, 30 mM, 35 mM, 40 mM, 45 mM, 50 mM, 55 mM, 60 mM, 65 mM, 70 mM, 75 mM, or more.

[0399] An exemplary composition for use in the methods herein contains a therapeutically effective amount of a modified MMP (e.g., any described in Section D); a calcium concentration to render the enzyme conditionally active upon administration (e.g., greater than physiological levels of calcium as described above, such as at least or about 5 mM or 10 mM); a buffer (e.g., Tris) at a concentration of about or at least 50 mM; a salt (e.g., NaCl) at a concentration of about or at least 150 mM; and is prepared at a pH of about or at least 7.5.

[0400] The composition containing the csMMP polypeptide can include a pharmaceutically acceptable carrier. Pharmaceutical compositions can include carriers such as a diluent, adjuvant, excipient, or vehicle with which an enzyme is administered. Examples of suitable pharmaceutical carriers are described in “Remington's Pharmaceutical Sciences” by E. W. Martin. Such compositions will contain a therapeutically effective amount of the compound, generally in purified form, together with a suitable amount of carrier so as to provide the form for proper administration to the patient. Such pharmaceutical carriers can be sterile liquids, such as water and oils, including those of petroleum, animal, vegetable or synthetic origin, such as peanut oil, soybean oil, mineral oil, and sesame oil. Water is a typical carrier when the pharmaceutical composition is administered intravenously. Saline solutions and aqueous dextrose and glycerol solutions also can be employed as liquid carriers, particularly for injectable solutions. Compositions can contain along with an active ingredient: a diluent, such as lactose, sucrose, dicalcium phosphate, or carboxymethylcellulose; a lubricant, such as magnesium stearate, calcium stearate and talc; and a binder such as starch, natural gums, such as gum acaciagelatin, glucose, molasses, polyvinylpyrrolidine, celluloses and derivatives thereof, povidone, crospovidones and other such binders known to those of skill in the art. Suitable pharmaceutical excipients include starch, glucose, lactose, sucrose, gelatin, malt, rice, flour, chalk, silica gel, sodium stearate, glycerol monostearate, talc, sodium chloride, dried skim milk, glycerol, propylene, glycol, water, and ethanol. A composition, if desired, also can contain minor amounts of wetting or emulsifying agents, or pH buffering agents, for example, acetate, sodium citrate, cyclodextrine derivatives, sorbitan monolaurate, triethanolamine sodium acetate, triethanolamine oleate, and other such agents.

[0401] 2. Formulations

[0402] The compositions used in the methods provided herein can be formulated into suitable pharmaceutical preparations such as solutions, suspensions, tablets, dispersible tablets, pills, capsules, powders, sustained release formulations, or elixirs, for oral administration, as well as transdermal patch preparation and dry powder inhalers. A composition can be formulated as a suppository, with traditional binders and carriers such as triglycerides. Oral formulations can include standard carriers such as pharmaceutical grades of mannitol, lactose, starch, magnesium stearate, sodium saccharine, cellulose, magnesium carbonate, and other such agents. The formulation should suit the mode of administration. Typically, the compounds are formulated into pharmaceutical compositions using techniques and procedures well known in the art (see e.g., Ansel, Introduction to Pharmaceutical Dosage Forms, Fourth Edition, 1985, 126).

[0403] Formulations are provided for administration to humans and animals in unit dosage forms, such as tablets, capsules, pills, powders, granules, sterile parenteral solutions or suspensions, and oral solutions or suspensions, and oil-water emulsions containing suitable quantities of the compounds or pharmaceutically acceptable derivatives thereof.

[0404] Compositions can be formulated for administration by any route known to those of skill in the art including intramuscular, intravenous, intradermal, intralesional, intraperitoneal injection, subcutaneous, epidural, nasal, oral, vaginal, rectal, topical, local, otic, inhalational, buccal (e.g., sublingual), and transdermal administration or any route. Administration can be local, topical or systemic depending upon the locus of treatment. Local administration to an area in need of treatment can be achieved by, for example, but not limited to, local infusion during surgery, topical application, e.g., in conjunction with a wound dressing after surgery, by injection, by means of a catheter, by means of a suppository, or by means of an implant. Topical applications of formulations can be facilitated by methods such as iontophoresis or sonophoresis. Compositions also can be administered with other biologically active agents, either sequentially, intermittently or in the same composition. Administration also can include controlled release systems including controlled release formulations and device controlled release, such as by means of a pump.

[0405] The most suitable route in any given case depends on a variety of factors, such as the nature of the disease, the progress of the disease, the severity of the disease the particular composition which is used. For purposes herein, it is desired that csMMP polypeptides are administered so that they reach the interstitium of skin or tissues. Thus, direct administration under the skin, such as by sub-epidermal administration methods, is contemplated. These include, for example, subcutaneous, intradermal and intramuscular routes of administration. Thus, in one example, local administration can be achieved by injection, such as from a syringe or other article of manufacture containing an injection device such as a needle. Other modes of administration also are contemplated. Pharmaceutical compositions can be formulated in dosage forms appropriate for each route of administration. Typically, the compositions herein are formulated for parenteral administration, generally characterized by injection, either subcutaneously, intramuscularly or intradermally, or for topical administration. Injectable and topically administrable formulations are described below.

[0406] In one example, the pharmaceutical preparation can be in liquid form, for example, solutions, syrups or suspensions. If provided in liquid form, the pharmaceutical preparation of a csMMP can be provided as a concentrated preparation to be diluted to a therapeutically effective concentration with a concentrated calcium-containing buffer such that the final calcium concentration is sufficient to render the csMMP active. A calcium-containing buffer can be added to the csMMP preparation prior to administration, or a calcium-containing buffer can be administered simultaneously, intermittently or sequentially with the csMMP preparation. Liquid preparations can be prepared by conventional means with pharmaceutically acceptable additives such as suspending agents (e.g., sorbitol syrup, cellulose derivatives or hydrogenated edible fats); emulsifying agents (e.g., lecithin or acacia); non-aqueous vehicles (e.g., almond oil, oily esters, or fractionated vegetable oils); and preservatives (e.g., methyl or propyl-p-hydroxybenzoates or sorbic acid).

[0407] In another example, pharmaceutical preparations can be presented in lyophilized form for reconstitution with water, calcium-containing buffer or other suitable vehicle before use. For example, the pharmaceutical preparations of csMMPs can be reconstituted with a solution containing activating concentrations of calcium. Alternatively, once reconstituted, the preparation can be mixed with a solution or buffer containing calcium in order to achieve a desired calcium concentration so as to render the csMMP active prior to use. For example, the final, reconstituted liquid preparation can contain a calcium concentration of 2 mM to 100 mM.

[0408] a. Injectables, Solutions and Emulsions

[0409] Parenteral administration, generally characterized by injection, either subcutaneously, intramuscularly or intradermally is contemplated herein. Injectables can be prepared in conventional forms, either as liquid solutions or suspensions, solid forms suitable for solution or suspension in liquid prior to injection, or as emulsions. Suitable excipients are, for example, water, saline, dextrose, glycerol or ethanol. The pharmaceutical compositions also may contain other minor amounts of non-toxic auxiliary substances such as wetting or emulsifying agents, pH buffering agents, stabilizers, solubility enhancers, and other such agents, such as for example, sodium acetate, sorbitan monolaurate, triethanolamine oleate and cyclodextrins. Implantation of a slow-release or sustained-release system, such that a constant level of dosage is maintained (see e.g., U.S. Pat. No. 3,710,795) also is contemplated herein. The percentage of active compound contained in such parenteral compositions is highly dependent on the specific nature thereof, as well as the activity of the compound and the needs of the subject.

[0410] Parenteral administration of the compositions generally includes sub-epidermal routes of administration such as intradermal, subcutaneous and intramuscular administrations. If desired, intravenous administration also is contemplated. Injectables are designed for local and systemic administration. For purposes herein, local administration is desired for direct administration to the affected interstitium. Preparations for parenteral administration include sterile solutions ready for injection, sterile dry soluble products, such as lyophilized powders, ready to be combined with a solvent just prior to use, including hypodermic tablets, sterile suspensions ready for injection, sterile dry insoluble products ready to be combined with a vehicle just prior to use and sterile emulsions. The solutions may be either aqueous or nonaqueous. If administered intravenously, suitable carriers include physiological saline or phosphate buffered saline (PBS), and solutions containing thickening and solubilizing agents, such as glucose, polyethylene glycol, and polypropylene glycol and mixtures thereof.

[0411] Pharmaceutically acceptable carriers used in parenteral preparations include aqueous vehicles, nonaqueous vehicles, antimicrobial agents, isotonic agents, buffers, antioxidants, local anesthetics, suspending and dispersing agents, emulsifying agents, sequestering or chelating agents and other pharmaceutically acceptable substances. Examples of aqueous vehicles include Sodium Chloride Injection, Ringers Injection, Isotonic Dextrose Injection, Sterile Water Injection, Dextrose and Lactated Ringers Injection. Nonaqueous parenteral vehicles include fixed oils of vegetable origin, cottonseed oil, corn oil, sesame oil and peanut oil. Antimicrobial agents in bacteriostatic or fungistatic concentrations can be added to parenteral preparations packaged in multiple-dose containers, which include phenols or cresols, mercurials, benzyl alcohol, chlorobutanol, methyl and propyl p-hydroxybenzoic acid esters, thimerosal, benzalkonium chloride and benzethonium chloride. Isotonic agents include sodium chloride and dextrose. Buffers include phosphate and citrate. Antioxidants include sodium bisulfate. Local anesthetics include procaine hydrochloride. Suspending and dispersing agents include sodium carboxymethylcellulose, hydroxypropyl methylcellulose and polyvinylpyrrolidone. Emulsifying agents include polysorbate 80 (TWEEN 80). Sequestering or chelating agents of metal ions include ethylenediaminetetraacetic acid (EDTA) and ethylene glycol tetraacetic acid (EGTA). Pharmaceutical carriers also include ethyl alcohol, polyethylene glycol and propylene glycol for water miscible vehicles and sodium hydroxide, hydrochloric acid, citric acid or lactic acid for pH adjustment.

[0412] The concentration of the pharmaceutically active compound is adjusted so that an injection provides an effective amount to produce the desired pharmacological effect. The exact dose depends on the age, weight and condition of the patient or animal as is known in the art. The unit-dose parenteral preparations are packaged in an ampoule, a vial or a syringe with a needle. The volume of liquid solution or reconstituted powder preparation, containing the pharmaceutically active compound, is a function of the disease to be treated and the particular article of manufacture chosen for package. For example, for the treatment of cellulite, it is contemplated that for parenteral injection the injected volume is or is about 10 to 50 milliliters. All preparations for parenteral administration must be sterile, as is known and practiced in the art.

[0413] Lyophilized Powders

[0414] Of interest herein are lyophilized powders, which can be reconstituted for administration as solutions, emulsions and other mixtures. They can also be reconstituted and formulated as solids or gels. A sterile, lyophilized powder is prepared by dissolving a compound of inactive enzyme in a buffer solution. The buffer solution may contain an excipient which improves the stability or other pharmacological component of the powder or reconstituted solution, prepared from the powder. Subsequent sterile filtration of the solution followed by lyophilization under standard conditions known to those of skill in the art provides the desired formulation. Briefly, the lyophilized powder is prepared by dissolving an excipient, such as dextrose, sorbitol, fructose, corn syrup, xylitol, glycerin, glucose, sucrose or other suitable agent, in a suitable buffer, such as citrate, sodium or potassium phosphate or other such buffer known to those of skill in the art. Then, a selected enzyme is added to the resulting mixture, and stirred until it dissolves. The resulting mixture is sterile filtered or treated to remove particulates and to insure sterility, and apportioned into vials for lyophilization. Each prepared vial will contain a single dosage (1 mg to 1 g, generally 1 to 100 mg, such as 1 to 5 mg) or multiple dosages of the compound. The lyophilized powder can be stored under appropriate conditions, such as at about 4° C. to room temperature.

[0415] Reconstitution of this lyophilized powder with a buffer solution provides a formulation for use in parenteral administration. The solution chosen for reconstitution can be any buffer. For reconstitution about 1 μg-20 mg, preferably 10 μg-1 mg, more preferably about 100 μg is added per mL of buffer or other suitable carrier. The precise amount depends upon the indication treated and selected compound. Such amount can be empirically determined.

[0416] b. Topical Administration

[0417] Topical mixtures are prepared as described for the local and systemic administration. The resulting mixture may be a solution, suspension, emulsions or the like and are formulated as creams, gels, ointments, emulsions, solutions, elixirs, lotions, suspensions, tinctures, pastes, foams, aerosols, irrigations, sprays, suppositories, bandages, dermal patches or any other formulations suitable for topical administration.

[0418] The compounds or pharmaceutically acceptable derivatives thereof may be formulated as aerosols for topical application, such as by inhalation (see e.g., U.S. Pat. Nos. 4,044,126; 4,414,209; and 4,364,923, which describe aerosols for delivery of a steroid useful for treatment inflammatory diseases, particularly asthma). These formulations for administration to the respiratory tract can be in the form of an aerosol or solution for a nebulizer, or as a microfine powder for insufflation, alone or in combination with an inert carrier such as lactose. In such a case, the particles of the formulation will typically diameters of less than 50 microns, preferably less than 10 microns.

[0419] The compounds may be formulated for local or topical application, such as for topical application to the skin and mucous membranes, such as in the eye, in the form of gels, creams, and lotions and for application to the eye or for intracisternal or intraspinal application. Topical administration is contemplated for transdermal delivery and also for administration to the eyes or mucosa, or for inhalation therapies. Nasal solutions of the active compound alone or in combination with other pharmaceutically acceptable excipients also can be administered.

[0420] Formulations suitable for transdermal administration are provided. They can be provided in any suitable format, such as discrete patches adapted to remain in intimate contact with the epidermis of the recipient for a prolonged period of time. Such patches contain the active compound in optionally buffered aqueous solution of, for example, 0.1 to 0.2 M concentration with respect to the active compound. Formulations suitable for transdermal administration also can be delivered by iontophoresis (see, e.g., Tyle, P. (1986) Pharm. Res. 3(6):318-326) or sonophoresis (Soroha et al. (2011) Int. Curr. Pharm. Res. 3(3):89-97) and typically take the form of an optionally buffered aqueous solution of the active compound.

[0421] c. Compositions for Other Routes of Administration

[0422] Depending upon the condition treated other routes of administration, such as topical application, transdermal patches, oral and rectal administration are also contemplated herein. For example, pharmaceutical dosage forms for rectal administration are rectal suppositories, capsules and tablets for systemic effect. Rectal suppositories include solid bodies for insertion into the rectum which melt or soften at body temperature releasing one or more pharmacologically or therapeutically active ingredients. Pharmaceutically acceptable substances utilized in rectal suppositories are bases or vehicles and agents to raise the melting point. Examples of bases include cocoa butter (theobroma oil), glycerin-gelatin, carbowax (polyoxyethylene glycol) and appropriate mixtures of mono-, di- and triglycerides of fatty acids. Combinations of the various bases may be used. Agents to raise the melting point of suppositories include spermaceti and wax. Rectal suppositories may be prepared either by the compressed method or by molding. The typical weight of a rectal suppository is about 2 to 3 g. Tablets and capsules for rectal administration are manufactured using the same pharmaceutically acceptable substance and by the same methods as for formulations for oral administration. Formulations suitable for rectal administration can be provided as unit dose suppositories. These can be prepared by admixing the active compound with one or more conventional solid carriers, for example, cocoa butter, and then shaping the resulting mixture.

[0423] For oral administration, pharmaceutical compositions can take the form of, for example, tablets or capsules prepared by conventional means with pharmaceutically acceptable excipients such as binding agents (e.g., pregelatinized maize starch, polyvinyl pyrrolidone or hydroxypropyl methylcellulose); fillers (e.g., lactose, microcrystalline cellulose or calcium hydrogen phosphate); lubricants (e.g., magnesium stearate, talc or silica); disintegrants (e.g., potato starch or sodium starch glycolate); or wetting agents (e.g., sodium lauryl sulphate). The tablets can be coated by methods well-known in the art.

[0424] Formulations suitable for buccal (sublingual) administration include, for example, lozenges containing the active compound in a flavored base, usually sucrose and acacia or tragacanth; and pastilles containing the compound in an inert base such as gelatin and glycerin or sucrose and acacia.

[0425] Pharmaceutical compositions also can be administered by controlled release formulations and/or delivery devices (see e.g., in U.S. Pat. Nos. 3,536,809; 3,598,123; 3,630,200; 3,845,770; 3,847,770; 3,916,899; 4,008,719; 4,687,610; 4,769,027; 5,059,595; 5,073,543; 5,120,548; 5,354,566; 5,591,767; 5,639,476; 5,674,533; and 5,733,566).

[0426] Various delivery systems are known and can be used to administer selected csMMPs, such as but not limited to, encapsulation in liposomes, microparticles, microcapsules, recombinant cells capable of expressing the compound, receptor mediated endocytosis, and delivery of nucleic acid molecules encoding selected matrix-degrading enzymes such as retrovirus delivery systems.

[0427] Hence, in certain embodiments, liposomes and/or nanoparticles also can be employed with administration of matrix-degrading enzymes. Liposomes are formed from phospholipids that are dispersed in an aqueous medium and spontaneously form multilamellar concentric bilayer vesicles (also termed multilamellar vesicles (MLVs)). MLVs generally have diameters of from 25 nm to 4 μm. Sonication of MLVs results in the formation of small unilamellar vesicles (SUVs) with diameters in the range of 200 to 500 angstroms containing an aqueous solution in the core.

[0428] Phospholipids can form a variety of structures other than liposomes when dispersed in water, depending on the molar ratio of lipid to water. At low ratios, the liposomes form. Physical characteristics of liposomes depend on pH, ionic strength and the presence of divalent cations. Liposomes can demonstrate low permeability to ionic and polar substances, but at elevated temperatures undergo a phase transition which markedly alters their permeability. The phase transition involves a change from a closely packed, ordered structure, known as the gel state, to a loosely packed, less-ordered structure, known as the fluid state. This occurs at a characteristic phase-transition temperature and results in an increase in permeability to ions, sugars and drugs.

[0429] Liposomes interact with cells via different mechanisms: endocytosis by phagocytic cells of the reticuloendothelial system such as macrophages and neutrophils; adsorption to the cell surface, either by nonspecific weak hydrophobic or electrostatic forces, or by specific interactions with cell-surface components; fusion with the plasma cell membrane by insertion of the lipid bilayer of the liposome into the plasma membrane, with simultaneous release of liposomal contents into the cytoplasm; and by transfer of liposomal lipids to cellular or subcellular membranes, or vice versa, without any association of the liposome contents. Varying the liposome formulation can alter which mechanism is operative, although more than one can operate at the same time. Nanocapsules can generally entrap compounds in a stable and reproducible way. To avoid side effects due to intracellular polymeric overloading, such ultrafine particles (sized around 0.1 μm) should be designed using polymers able to be degraded in vivo. Biodegradable polyalkyl-cyanoacrylate nanoparticles that meet these requirements are contemplated for use herein, and such particles can be easily made.

[0430] 3. Dosages and Administration

[0431] Pharmaceutical compositions containing a modified MMP, such as any described herein, are typically formulated and administered in a therapeutically effective amount. In particular, a modified MMP, such as any selected csMMP polypeptide described herein, is administered in an amount sufficient that when activated to a mature form and exposed to high calcium concentrations (e.g., 10 mM Ca²⁺), exerts a therapeutically useful effect in the absence of undesirable side effects on the subject receiving treatment. Therapeutically effective concentrations can be determined empirically by testing the compounds in known in vitro and in vivo systems, such as the assays provided herein. The concentration of a selected csMMP polypeptide in the composition depends on absorption, inactivation and excretion rates of the complex, the physicochemical characteristics of the complex, the dosage schedule, and amount administered as well as other factors known to those of skill in the art. For example, it is understood that the precise dosage and duration of treatment is a function of the tissue being treated and may be determined empirically using known testing protocols or by extrapolation from in vivo or in vitro test data. It is to be noted that concentrations and dosage values may also vary with the age or gender of the individual treated. It is to be further understood that for any particular subject, specific dosage regimens should be adjusted over time according to the individual need and the professional judgment of the person administering or supervising the administration of the formulations, and that the concentration ranges set forth herein are exemplary only and are not intended to limit the scope thereof.

[0432] The amount of a selected csMMP polypeptide to be administered for the treatment of an ECM-mediated disease or condition, for example a collagen-mediated disease or condition, such as cellulite or lymphedema, can be determined by standard clinical techniques. In addition, in vitro assays and animal models can be employed to help identify optimal dosage ranges. The precise dosage, which can be determined empirically, can depend on the particular enzyme, the route of administration, the type of disease to be treated and the seriousness of the disease. Dosage levels also can be determined based on a variety of factors, such as body weight of the individual, general health, age, the activity of the specific compound employed, sex, diet, time of administration, rate of excretion, drug combination, the severity and course of the disease, and the patient's disposition to the disease and the judgment of the treating physician. The amount of active ingredient that can be combined with the carrier materials to produce a single dosage form will vary depending upon the particular matrix-degrading enzyme, the host treated, the particular mode of administration, and the calcium concentration required for activation, and/or the predetermined or length of time in which activation is desired.

[0433] Exemplary dosages range from or about 10 μg to 100 mg, particularly 50 μg to 75 mg, 100 μg to 50 mg, 250 μg to 25 mg, 500 μg to 10 mg, 1 mg to 5 mg, or 2 mg to 4 mg. The particular dosage and formulation thereof depends upon the indication and individual. If necessary, dosage can be empirically determined. Typically the dosage is administered for indications described herein in a volume of 1-100 mL, particularly, 1-50 mL, 10-50 mL, 10-30 mL, 1-20 mL, or 1-10 mL volumes following reconstitution, for example, in a buffer containing high concentrations of calcium greater than physiological levels of calcium (e.g., 2 mM to 100 mM, such as 5 mM to 50 mM, and generally at least or about at least 10 mM Ca²⁺) so as to render the csMMP active. Typically, such dosages are from at or about 100 μg to 50 mg, generally 1 mg to 5 mg, in a final volume of 10 to 50 mL. The pharmaceutical compositions typically should provide a dosage of from about 1 μg/mL to about 20 mg/mL. Generally, dosages are from or about 10 μg/mL to 1 mg/mL, typically about 100 μg/mL, per single dosage administration.

[0434] A csMMP can be formulated in compositions to be administered at once, or can be divided into a number of smaller doses to be administered at intervals of time. Selected csMMP polypeptides can be administered in one or more doses over the course of a treatment time for example over several hours, days, weeks, or months. In some cases, continuous administration is useful. It is understood that the precise dosage and course of administration depends on the methods of calcium-dependent activation contemplated.

[0435] Pharmaceutically therapeutically active compounds and derivatives thereof are typically formulated and administered in unit dosage forms or multiple dosage forms. Each unit dose contains a predetermined quantity of therapeutically active compound sufficient to produce the desired therapeutic effect, in association with the required pharmaceutical carrier, vehicle or diluent. Examples of unit dose forms include ampoules and syringes and individually packaged tablets or capsules. Unit dose forms can be administered in fractions or multiples thereof. A multiple dose form is a plurality of identical unit dosage forms packaged in a single container to be administered in segregated unit dose form. Examples of multiple dose forms include vials, bottles of tablets or capsules or bottles of pints or gallons. Hence, multiple dose form is a multiple of unit doses that are not segregated in packaging. Generally, dosage forms or compositions containing active ingredient in the range of 0.005% to 100% with the balance made up from non-toxic carrier can be prepared.

[0436] Also, it is understood that the precise dosage and duration of treatment is a function of the disease being treated and can be determined empirically using known testing protocols or by extrapolation from in vivo or in vitro test data. It is to be noted that concentrations and dosage values also can vary with the severity of the condition to be alleviated. It is to be further understood that for any particular subject, specific dosage regimens should be adjusted over time according to the individual need and the professional judgment of the person administering or supervising the administration of the compositions, and that the concentration ranges set forth herein are exemplary only and are not intended to limit the scope or use of compositions and combinations containing them. The compositions can be administered hourly, daily, weekly, monthly, yearly or once. Generally, dosage regimens are chosen to limit toxicity. It should be noted that the attending physician would know how to and when to terminate, interrupt or adjust therapy to lower dosage due to toxicity, or bone marrow, liver or kidney or other tissue dysfunctions. Conversely, the attending physician would also know how to and when to adjust treatment to higher levels if the clinical response is not adequate (provided toxic side effects do not preclude a higher dose).

[0437] Administration methods can be employed to decrease the exposure of modified MMP polypeptides to degradative processes, such as proteolytic degradation and immunological intervention via antigenic and immunogenic responses. Examples of such methods include local administration at the site of treatment. PEGylation of therapeutics has been reported to increase resistance to proteolysis, increase plasma half-life, and decrease antigenicity and immunogenicity. Examples of PEGylation methodologies are known in the art (see for example, Lu and Felix (1994) Int. J. Peptide Protein Res. 43:127-138; Lu and Felix (1993) Peptide Res. 6:140-146; Felix et al. (1995) Int. J. Peptide Res. 46:253-264; Benhar et al. (1994) J. Biol. Chem. 269:13398-13404; Brumeanu et al. (1995) J. Immunol. 154:3088-3095; see also, Caliceti et al. (2003) Adv. Drug Deliv. Rev. 55(10):1261-1277 and Molineux (2003) Pharmacotherapy 23 (8 Pt 2):3S-8S). PEGylation also can be used in the delivery of nucleic acid molecules in vivo. For example, PEGylation of adenovirus can increase stability and gene transfer (see e.g., Cheng et al. (2003) Pharm. Res. 20(9):1444-1451).

### G. METHODS OF ASSESSING csMMP ACTIVITY

[0438] Modified MMPs, including csMMPs, can be tested for their enzymatic activity against known substrates. Activity assessment can be performed at varying calcium concentrations or at varying concentrations combined with variations in other parameters, such as varying temperatures. Activity assessments can be performed on conditioned medium or other supernatants or on purified protein.

[0439] 1. Methods of Assessing Enzymatic Activity

[0440] Enzymatic activity can be assessed by assaying for substrate cleavage using known substrates of the enzyme. The substrates can be in the form of a purified protein or provided as peptide substrates. For example, enzymatic activity of a MMP can be assessed by cleavage of collagen. Cleavage of a purified protein by an enzyme can be assessed using any method of protein detection, including, but not limited to, HPLC, SDS-PAGE analysis, ELISA, Western blotting, immunohistochemistry, immunoprecipitation, N-terminal sequencing, protein labeling and fluorometric methods. For example, Example 6 describes an assay to assess enzymatic activity for cleavage of a collagen that is FITC-labeled. Fluorescence of the supernatant is an indication of the enzymatic activity of the protein and can be normalized to protein concentration and a standard curve for specific activity assessment.

[0441] In addition, enzymatic activity can be assessed on tetrapeptide substrates. The use of fluorogenic groups on the substrates facilitates detection of cleavage. For example, substrates can be provided as fluorogenically tagged tetrapeptides of the peptide substrate, such as an ACC- or 7-amino-4-methylcoumarin (AMC)-tetrapeptide. Other fluorogenic groups are known and can be used and coupled to protein or peptide substrates. These include, for example, 7-amino-4-methyl-2-quinolinone (AMeq), 2-naphthylamine (NHNap) and 7 amino-4-methylcoumarin (NHMec) (Sarath et al., “Protease Assay Methods,” in Proteolytic Enzymes: A Practical Approach., Ed. Robert J. Beynon and Judith S. Bond; Oxford University Press, 2001. pp. 45-76). Peptide substrates are known to one of skill in the art, as are exemplary fluorogenic peptide substrates. For example, exemplary substrates for MMP include peptide IX, designated as Mca-K-P-L-G-L-Dpa-A-R-NH₂ (SEQ ID NO:88; Mca=(7-methoxycoumarin-4-yl)acetyl; Dpa=N-3-(2,4,-dinitrophenyl)-L-2,3-diaminopropionyl; R&D Systems, Minneapolis, Minn., Cat#ES010) and variations thereof such as with different fluorogenic groups. Enzyme assays to measure enzymatic activity by fluorescence intensity are standard and are typically performed as a function of incubation time of the enzyme and substrate (see e.g., Dehrmann et al. (1995) Arch. Biochem. Biophys. 324:93-98; Barrett et al. (1981) Methods Enzymol. 80:536-561). Exemplary assays using fluorescence substrates are described in Example 2.C herein.

[0442] While detection of fluorogenic compounds can be accomplished using a fluorometer, detection can be accomplished by a variety of other methods well known to those of skill in the art. Thus, for example, when the fluorophores emit in the visible wavelengths, detection can be simply by visual inspection of fluorescence in response to excitation by a light source. Detection also can be by means of an image analysis system utilizing a video camera interfaced to a digitizer or other image acquisition system. Detection also can be by visualization through a filter, as under a fluorescence microscope. The microscope can provide a signal that is simply visualized by the operator. Alternatively, the signal can be recorded on photographic film or using a video analysis system. The signal also can simply be quantified in real-time using either an image analysis system or a photometer.

[0443] Thus, for example, a basic assay for enzyme activity of a sample involves suspending or dissolving the sample in a buffer (at the pH optima of the particular protease being assayed) adding to the buffer a fluorogenic enzyme peptide indicator, and monitoring the resulting change in fluorescence using a spectrofluorometer as shown in e.g., Harris et al., (1998) J. Biol. Chem. 273(42):27364-27373. The spectrofluorometer is set to excite the fluorophore at the excitation wavelength of the fluorophore. The fluorogenic enzyme indicator is a substrate sequence of an enzyme (e.g., of a protease) that changes in fluorescence due to a protease cleaving the indicator.

[0444] 2. Methods of Assessing Degradation of ECM Component

[0445] The degradation of extracellular matrix proteins by modified csMMPs including, but not limited to, those described above, such as csMMP-1, can be assessed in vitro or in vivo. Assays for such assessment are known to those of skill in the art, and can be used to test the activities of a variety of csMMPs on a variety of extracellular matrix proteins, including, but not limited to collagen (I, II, III and IV), fibronectin, vitronectin and proteoglycans. Assays can be performed at high (e.g., 10 mM) and low (e.g., 1-1.3 mM) concentrations of Ca²⁺. Experiments also can be performed in the presence of a MMP that is not modified to be calcium sensitive. It is understood that assays for enzymatic activity are performed subsequent to activation of the enzyme by a processing agent. As a further control, activity of the zymogen enzyme also can be assessed.

[0446] a. In Vitro Assays

[0447] Exemplary in vitro assays include assays to assess the degradation products of extracellular matrix proteins following incubation with a csMMP. In some examples, the assays detect a single, specific degradation product. In other examples, the assays detect multiple degradation products, the identity of which may or may not be known. Assessment of degradation products can be performed using methods well known in the art including, but not limited to, HPLC, CE, Mass spectrometry, SDS-PAGE analysis, ELISA, Western blotting, immunohistochemistry, immunoprecipitation, N-terminal sequencing, and protein labeling. Extracellular matrix degradation products can be visualized, for example, by SDS-PAGE analysis following incubation with a csMMPs for an appropriate amount of time in the presence of the appropriate concentration of Ca²⁺. For example, collagen can be incubated with a mature csMMP and subjected to SDS-PAGE using, for example, a 4-20% Tris/glycine gel to separate the products. Coomassie staining of the gel facilitates visualization of smaller degradation products, or disappearance of collagen bands, compared to intact collagen. Immunoblotting using, for example, a polyclonal Ig specific to the extracellular matrix protein also can be used to visualize the degradation products following separation with SDS-PAGE.

[0448] Assays that specifically detect a single product following degradation of an extracellular matrix protein also are known in the art and can be used to assess the ability of a csMMP to degrade an extracellular matrix protein. For example, the hydroxyproline (HP) assay can be used to measure degradation of collagen. 4-hydroxyproline is a modified imino acid that makes up approximately 12% of the weight of collagen. HP assays measure the amount of solubilized collagen by determining the amount of HP in the supernatant following incubation with a matrix-degrading enzyme (see e.g., Reddy and Enwemeka (1996) Clin. Biochem. 29:225-229). Measurement of HP can be effected by, for example, colorimetric methods, high performance liquid chromatography, mass spectrometry and enzymatic methods (see e.g., Edwards et al. (1980) Clin. Chim. Acta 104:161-167; Green (1992) Anal. Biochem. 201:265-269; Tredget et al. (1990) Anal. Biochem. 190:259-265; Ito et al. (1985) Anal. Biochem. 151:510-514; Garnero et al. (1998) J Biol. Chem. 273:32347-32352).

[0449] The collagen source used in such in vitro assays can include, but is not limited to, commercially available purified collagen, bone particles, skin, cartilage and rat tail tendon. Collagenolytic activity of a csMMP, such as csMMP-1, can be assessed by incubating the activated enzyme with an insoluble collagen suspension, followed by hydrolysis, such as with HCl. The amount of hydroxyproline derived from the solubilized (degraded) collagen can be determined by spectrophotometric methods, such as measuring the absorbance at 550 nm following incubation with Ehrlich's reagent. In some examples, the collagen source is rat or pig skin explant that is surgically removed from anesthetized animals and then perfused with the csMMP, for example, csMMP-1, prior to, subsequent to, simultaneously with or intermittently with a calcium-containing formulation. HP levels in the perfusates can then be assessed. In a modification of this method, the effect on the fibrous septae in the explants also can be assessed. Briefly, following perfusion with the enzyme, the explants are cut into small pieces and embedded in paraffin and analyzed by microscopy following Masson's Trichrome staining for visualization of collagen. The number of collagen fibrous septae can be visualized and compared to tissue that has not been treated with an enzyme.

[0450] Assays to detect degradation of specific collagens also are known in the art. Such assays can employ immunological methods to detect a degradation product unique to the specific collagen. For example, the degradation of collagen I by some MMPs releases telopeptides with different epitopes that can be detected using immunoassays. Such assays detect the cross-linked N-telopeptides (NTx) and/or the cross-linked C-telopeptides (CTx and ICTP), each of which contain unique epitopes. Typically, CTx assays utilize the CrossLaps (Nordic Biosciences) antibodies that recognize the 8-amino acid sequence EKAHD-β-GGR octapeptide (SEQ ID NO:77), where the aspartic acid is in β-isomerized configuration, in the C-terminal telopeptide region of the α1 chain (Eastell (2001) Bone Markers: Biochemical and Clinical Perspectives, pg 40). Immunoassays to detect ICTP also are known in the art and can be used to detect degradation of collagen I (U.S. Pat. No. 5,538,853). In other examples, immunoassays, such as, for example, ELISAs, can be used to detect NTx following incubation of collagen type I with proteases such as a MMP (Atley et al. (2000) Bone 26:241-247). Other antibodies and assays specific for degraded collagens are known in the art and can be used to detect degradation by matrix-degrading enzymes. These include antibodies and assays specific for degraded collagen I (Hartmann et al. (1990) Clin. Chem. 36:421-426), collagen II (Hollander et al. (1994) J. Clin. Invest. 93:1722-1732), collagen III (U.S. Pat. No. 5,342,756), and collagen IV (Wilkinson et al. (1990) Anal. Biochem. 185:294-296).

[0451] b. In Vivo Assays

[0452] Assays to detect the in vivo degradation of ECM also are known in the art. Such assays can utilize the methods described above to detect, for example, hydroxyproline and N- and C-telopeptides and degraded collagens or other ECM in biological samples such as urine, blood, serum and tissue. Detection of degraded ECM can be performed following administration to the patient of one or more enzymes. Detection of pyridinoline (PYD) and deoxypyridinoline (DPYD) also can be used to assess degradation of collagen. Also known as hydroxylysylpyridinoline and lysylpyridinoline, respectively, PYD and DPYD are the two nonreducible trivalent cross-links that stabilize type I collagen chains and are released during the degradation of mature collagen fibrils. Pyridinoline is abundant in bone and cartilage, whereas deoxypyridinoline is largely confined to bone. Type III collagen also contains pyridinoline cross-links at the amino terminus. Total PYD and DPYD can be measured, for example, in hydrolyzed urine samples or serum by fluorometric detection after reverse-phase HPLC (Hata et al. (1995) Clin. Chimica. Acta. 235:221-227).

[0453] c. Non-Human Animal Models

[0454] Non-human animal models can be used to assess the activity of matrix-degrading enzymes. For example, non-human animals can be used as models for a disease or condition. Non-human animals can be injected with disease and/or phenotype-inducing substances prior to administration of enzymes. Genetic models also are useful. Animals, such as mice, can be generated which mimic a disease or condition by the overexpression, underexpression or knock-out of one or more genes. For example, animal models are known in the art for conditions including, but not limited to, Peyronie's Disease (Davila et al. (2004) Biol. Reprod 71:1568-1577), tendinosis (Warden et al. (2006) Br. J. Sports Med. 41:232-240) and scleroderma (Yamamoto (2005) Cur. Rheum. Rev. 1:105-109).

[0455] Non-human animals also can be used to test the activity of enzymes in vivo in a non-diseased animal. For example, enzymes can be administered to non-human animals, such as, a mouse, rat or pig, and the level of ECM degradation can be determined. In some examples, the animals are used to obtain explants for ex vivo assessment of ECM degradation. In other examples, ECM degradation is assessed in vivo. For example, collagen degradation of the skin of anesthetized animals can be assessed. Briefly, a csMMP, such as a csMMP-1, is perfused prior to, simultaneously, subsequently or intermittently with administration of calcium-containing formulation via insertion of a needle into the dermal layer of the skin of the tail. Perfusate fractions are collected from the tail skin and analyzed for collagen degradation by hydroxyproline analysis. Other methods can be used to detect degradation including, but not limited to, any of the assays described above, such as immunoassays to detect specific degradation products.

### H. METHODS OF CONDITIONAL ACTIVATION FOR TREATING DISEASES OR DEFECTS OF THE ECM

[0456] The methods provided herein use modified MMP polypeptides, such as any of the csMMPs described above, for treatment of any fibrotic disease or condition mediated by any one or more ECM components, particularly collagen-mediated conditions. In particular examples herein, modified MMP-1 polypeptides or catalytically active fragments thereof are employed in methods of treatment of fibrotic diseases or condition. Excessive deposition of ECM components is the predominant characteristic of many fibrotic diseases. The range of affected organs and tissues is large and includes a host of diseases that include, but are not limited to, pulmonary diseases, liver diseases, kidney fibrosis, localized scleroderma, Peyronie's Disease, Dupuytren's contracture, hypertrophic scarring, keloids, frozen shoulder, lipoma, cellulite, scarred tendons, glaucoma, herniated intervertebral discs and others. Fibrotic diseases and conditions are principally caused by the production or overproduction of collagens and other extracellular matrix proteins, which can occur due to tissue damage or other injury. The production or overproduction of collagen or other ECM components can be caused by TGF-β signaling in fibroblasts associated with the tissue fibrosis. Concomitant with the increase in ECM components is the decrease in the synthesis of MMPs and the increase in their inhibitors (e.g., TIMPS), which is a contributing factor for the establishment and progression of fibrosis.

[0457] This section provides exemplary methods, uses and applications for the csMMPs that are modified MMPs that exhibit calcium-regulated activity. These methods of therapy described herein are exemplary and do not limit the applications of the methods provided. Such methods include, but are not limited to, methods of treatment of any fibrotic disease or condition that is caused by excess, aberrant or accumulated expression of any one or more ECM component. Exemplary of diseases or conditions to be treated are any mediated by collagen, elastin, fibronectin, or a glycosaminoglycan such as a proteoglycan. In particular, the diseases and conditions are those that involve or are associated with aberrant or accumulated production of collagen type I or collagen type II. Exemplary of such fibrotic diseases or conditions that are collagen-mediated diseases or disorders include, but are not limited to, cellulite, Dupuytren's disease (also called Dupuytren's contracture), Peyronie's disease, frozen shoulder, chronic tendinosis or scar tissue of the tendons, localized scleroderma, lipoma, lymphedema, keloids, hypertrophic scars. Also included are methods of using the modified MMPs in uses and applications for the treatment of glaucoma or herniated invertebral discs or as an adjunct to vitrectomy. It is within the skill of a treating physician to identify such diseases or conditions.

[0458] 1. Selecting Modified MMP

[0459] The particular disease or condition to be treated dictates the enzyme that is selected. For example, treatment of a collagen-mediated disease or disorder can be effected by administration of a csMMP that cleaves collagen. In particular, the modified MMP is generally selected that has a range of substrate specificity that matches the particular disease or condition. For example, generally collagen-mediated diseases or the condition of the ECM are mediated or associated with type I or type III collagen, and hence a MMP is selected that cleaves type I and/or type III collagen. For example, if the disease or condition is mediated or associated with a type I collagen, a modified MMP is selected that is a modified MMP-1, MMP-2, MMP-7, MMP-8, MMP-12, MMP-13, MMP-14 and MMP-18, or catalytically active fragment thereof. If the disease or condition is mediated or associated with a type III collagen, a modified MMP is selected that is a modified MMP-1, MMP-2, MMP-3, MMP-8, MMP-10, MMP-13, MMP-14 and MMP-16. In other cases, if the disease or condition is mediated or associated with a type I collagen and a type III collagen, a modified MMP is selected that is a MMP-1, MMP-2, MMP-8, MMP-13 and MMP-14. In particular examples herein, the modified MMP for use in the methods and treatments herein is a modified MMP-1 or catalytically active fragment thereof. In particular, any of the modified MMP polypeptides, such as modified MMP-1 polypeptides, described herein above can be used. Particular csMMPs, and systems and methods for activation, can be chosen accordingly to treat a particular disease or condition.

[0460] Treatment of diseases and conditions with csMMPs can be effected by any suitable route of administration using suitable formulations as described herein including, but not limited to, subcutaneous injection, intramuscular, intradermal, oral, and topical and transdermal administration. As described above, a route of administration of csMMPs typically is chosen that results in administration to the ECM directly to the affected site, such as administration under the skin. Exemplary of such routes of administration include, but are not limited to, subcutaneous, intramuscular, or intradermal injection.

[0461] If necessary, a particular dosage and duration and treatment protocol can be empirically determined or extrapolated. For example, exemplary doses of csMMPs, such as any described above, can be used as a starting point to determine appropriate dosages. It is understood that the amount to administer will be a function of the csMMP and the calcium concentration to be administered, the indication treated, and possibly side effects that will be tolerated. Dosages can be empirically determined using recognized models for each disorder. Also, as described elsewhere herein, csMMPs, can be administered in combination with other agents sequentially, simultaneously or intermittently. Exemplary of such agents include, but are not limited to, lidocaine, epinephrine, a dispersing agent such as hyaluronidase and combinations thereof.

[0462] Upon improvement of a patient's condition, a maintenance dose of an activating formulation, additional compound for treatment, or additional or different csMMP compositions can be administered if necessary; and the dosage, the dosage form, or frequency of administration, or a combination thereof, can be modified. In some cases, a subject can require intermittent treatment on a long-term basis upon any recurrence of disease symptoms.

[0463] 2. Methods of Conditional Activation

[0464] Bacterial collagenases have been used in the treatment of fibrotic diseases and conditions (see e.g., U.S. Pat. Nos. RE39,941; 5,589,171; 6,086,872; 7,811,560; 6,074,664; and 7,641,900; and U.S. Published Application Nos. US 2007/0224184; US 2003/0170225; US 2006/0222639; and US 2008/0145357). MMP-1 also has been used for the treatment of fibrotic diseases or conditions (Limuro et al. (2003) Gastroenterol. 124:445-458; Bedair et al. (2007) J. Appl. Physiol. 102:2338-2345); Kaar et a (2008) Acta Biomaterialia 4:1411-1420). Such methods have shown that the use of MMPs can decrease fibrosis by degrading or cleaving a collagen component, such as collagen (e.g., type I or type III). Existing methods, however, are limited by the prolonged activation of the enzyme in vivo. For example, diffusion of the administered enzyme at the site of administration would result in degradation of the ECM component in unwanted areas that are peripheral to the desired treatment area.

[0465] In contrast to these methods, the instant methods are directed to methods of treatment using conditionally activated MMP polypeptides, including conditionally active MMP-1 polypeptides, that are regulated through the use of calcium. Hence, through the use of high concentrations of calcium greater than physiological concentrations, the modified MMP can be used to temporally or conditionally cleave a component of the ECM (e.g., collagen, such as type I or type III collagen) to thereby treat the fibrotic disease or condition. In some examples of the methods herein, conditional activation of the administered MMP polypeptide also can be achieved by temperature regulation. U.S. Published Application No. 2010/0284995 describes temperature sensitive mutants of MMPS that exhibit reduced activity at the temperature of the physiological environment (e.g., 37° C.) and greater activity at lower temperatures (e.g., 25° C.), and the use thereof for treatment of fibrotic diseases and conditions, including collagen-mediated diseases and conditions. Hence, one more modified MMP polypeptide can be employed to permit conditional regulation of the MMP activity based on both calcium and temperature.

[0466] a. Calcium

[0467] The condition-dependent (i.e., calcium-dependent) nature of the csMMP polypeptide activity, used in the methods provided herein, permits regulation by administration of formulations that contain calcium. Hence, the activity of the csMMP polypeptide can be conditionally controlled or regulated by calcium in the methods provided herein. In the methods provided herein, the modified MMP polypeptide is co-administered with a high concentration of calcium greater than physiological levels (e.g., 2 mM to 100 mM, such as 5 mM to 50 mM or 2 mM to 20 mM, for example at least 10 mM) to a physiological locus. For example, the modified MMP is co-administered with the high concentration of calcium to the ECM of a subject, such as by injection. The modified MMP and calcium can be administered together as a single composition. In other cases, compositions containing a modified MMP and high concentrations of calcium can be administered separately, whereby the calcium is administered prior to, subsequently with, simultaneously with or intermittently with the modified MMP at or near the same site or locus of administration of the MMP. For example, the separately administered calcium-containing formulation is administered to the site containing the csMMP and/or the affected site where csMMP activity is desired. For example, in instances where csMMP activity is desired in the upper epidermis, transdermal delivery of Ca²⁺-containing formulations can be effected by sonophoresis (Menon et al. (1994) J. Invest. Dermatol. 102(5):789-795). In any of such examples, when administered to a physiologic locus of a subject in vivo that normally contains a physiological level of calcium (e.g., less than 2 mM, such as about 1 mM to 1.3 mM), the activity of the modified enzyme will be restricted to the desired treatment area regulated to contain the higher calcium concentration, since diffusion of the enzyme from this area would cause it to encounter the lower, physiological calcium concentration and be inactivated.

[0468] In aspects of the methods herein, the csMMP activity can be restored after the activity expires in vivo at the site of administration. For example, after the activity of previously activated csMMP (e.g., csMMP administered in the presence of high Ca²⁺, such as 10 mM Ca²⁺) becomes inactive or exhibits substantially decreased activity, following dispersion or cellular uptake of the extracellular Ca²⁺ in the local environment of the csMMP, the csMMP can be reactivated, in other words the activity of the csMMP can be restored, upon administration of a calcium-containing formulation that returns the calcium concentration in the local environment to a sufficient concentration to reinstate csMMP activity. For example, a calcium-containing buffer or fluid can be administered to reinstate csMMP activity after the activity has lapsed. The calcium-containing formulation formulated for subsequent administration can contain concentrations of Ca²⁺ of at least or about at least 2 mM, 3 mM, 4 mM, 5 mM, 6 mM, 7 mM, 8 mM, 9 mM, 10 mM, 15 mM, 20 mM, 25 mM, 50 mM, 100 mM or greater than 100 mM Ca²⁺. In examples where the particular enzyme is reversibly active, the calcium-containing formulation can be administered intermittently over a course of hours or days. Thus, the time duration of csMMP activity renewal also can be controlled by continued or recurring exposure to high calcium concentrations (e.g., 10 mM Ca²⁺) for a predetermined length of time.

[0469] If the treating physician determines that deactivation, or reduced activity, of the administered csMMP is necessary, for example upon completion of treatment or to cease or prevent undesired side-effects, a deactivating formulation also can be administered. Due to the sensitivity of the csMMP polypeptides used in the methods provided herein to calcium concentrations, the methods provided herein optionally include the use of formulations capable of sequestering calcium ions thereby effecting deactivation of csMMP polypeptides rendered active by calcium. Calcium chelating agents, such as ethylenediaminetetraacetic acid (EDTA), ethylene glycol tetraacetic acid (EGTA), 1,2-bis(o-aminophenoxy)ethane-N,N,N′,N′-tetraacetic acid (BAPTA), derivatives thereof (e.g., diesters of BAPTA), or other synthetic calcium chelating agents (see e.g., U.S. Pat. No. 7,799,831; Woessner (1999) Ann. N.Y. Acad. Sci. 878:388-403), sequester calcium, resulting in a decrease in the availability of Ca²⁺ ions. Hence, deactivating formulations can include calcium-chelating agents, such as BAPTA, EGTA and/or EDTA, which sequester Ca²⁺ ions, thereby reducing csMMP activity and/or rendering the administered csMMP inactive or substantially inactive. Deactivating formulations can be administered by any suitable route of administration using suitable formulations as described herein including, but not limited to, subcutaneous injection, intramuscular, intradermal, oral, and topical and transdermal administration. A route of administration of a deactivating formulation typically is chosen that results in administration under the skin directly to the site containing the csMMP. Exemplary of such routes of administration include, but are not limited to, subcutaneous, intramuscular, or intradermal injection.

[0470] Thus, calcium chelating agents can be included in formulations, used in the methods provided herein, to sequester calcium in the environment of an active csMMP, resulting in a local decrease in calcium concentration and inactivation or decreased activity of the csMMP. The calcium chelator compositions can be formulated into any suitable pharmaceutical preparation such as a solution, suspension, tablet, dispersible tablet, pill, capsule, powder, sustained release formulation, or elixir, for oral administration. Typically, the calcium chelator-containing composition is formulated for parenteral administration, generally characterized by either subcutaneous, intramuscular or intradermal injection. Thus, formulations described in Section F above can include a calcium chelating agent. Calcium chelator-containing formulations typically do not include csMMP polypeptides.

[0471] In one example, a composition containing an effective amount of calcium chelating agent is administered to a location containing an active csMMP to inactivate or reduce the activity of the csMMP. The effective amount of calcium chelating agent in the formulation will vary depending on the particular chelating agent, the particular csMMP, the particular patient, the tissue to which the formulation is administered, the disease to be treated, the route of administration, and other considerations, including the urgency of cessation of csMMP activity. Thus, dosages can be empirically determined based on known testing protocols or extrapolation from in vivo or in vitro test data.

[0472] Typically, a calcium chelating formulation contains a calcium chelating agent, such as BAPTA, EGTA or EDTA at a concentration of 1 μM to 100 mM, such as 10 μM to 20 mM. Volumes administered can be adjusted depending on the disease to be treated and the route of administration. It is contemplated herein that 1-100 mL, 1-50 mL, 10-50 mL, 10-30 mL, 1-20 mL, or 1-10 mL, typically 1-20 mL of a calcium chelating formulation can be administered subcutaneously to regulate the activity of a csMMP used for the treatment of an ECM-mediated disease or condition, such as cellulite. The administration can be subsequent to or intermittent with administration of a calcium-containing formulation. Thus, one of skill in the art can modulate csMMP activity using both calcium-containing and calcium-chelating formulations to achieve the desired duration of activity.

[0473] b. Temperature

[0474] The procedures used to activate csMMP polypeptides, which employ co-formulation or co-administration of calcium, can be combined with other procedures which can modulate csMMP activity. In particular examples, among the csMMPs described herein are those that contain modifications that confer temperature sensitivity in addition to calcium sensitivity. For example, csMMP polypeptides that are modified to be temperature sensitive exhibit increased activity at a permissive temperature (e.g., 25° C.) compared to non-permissive temperatures (e.g., 34° C. or 37° C.). Exemplary modifications which can render a MMP, such as a MMP-1 polypeptide, temperature sensitive are set forth in U.S. Publication No. 2010/0284995. Thus, where the additional feature is temperature sensitivity, activation of the csMMP can be achieved by increasing the local calcium concentration and by altering the temperature at the site of administration. In other words, a temperature-sensitive csMMP can be activated by exogenous application of a temperature condition and administration of sufficient calcium.

[0475] The temperature of the site of injection can be modulated by any method known in the art, for example methods disclosed in U.S. Publication No. 2010/0284995. For example, the temperature of the temperature-sensitive csMMP can be adjusted by changing the temperature of one or more injection buffers or by applying a heating or cooling pack. For example, where the permissive temperature of the temperature-sensitive csMMP is 25° C. and the non-permissive temperature is body temperature (e.g., 34° C. or 37° C.), a buffer or other liquid diluent that is less than or less than about 25° C., 24° C., 23° C., 22° C., 21° C., 20° C., 19° C., 18° C., 17° C., 16° C., 15° C., 14° C., 13° C., 12° C., 11° C., 10° C., 9° C., 8° C., 7° C., 6° C., 5° C. or less can be injected to cool the site of treatment. In other words, the temperature-sensitive csMMP is provided and/or exposed to a buffer or other liquid diluent that is less than or less than about 25° C., 24° C., 23° C., 22° C., 21° C., 20° C., 19° C., 18° C., 17° C., 16° C., 15° C., 14° C., 13° C., 12° C.-11° C., 10° C., 9° C., 8° C., 7° C., 6° C., 5° C. or less. The buffer or liquid can be provided in the same composition as the temperature-sensitive csMMP or in a separate composition. When provided separately, it can be administered prior to, simultaneously with, subsequent to or intermittently with the temperature-sensitive csMMP. Upon administration in vivo where the physiologic temperature is at or about 37° C., the temperature of the buffer warms by heat transfer from the body of the subject to a temperature providing the permissive temperature for activation of the temperature-sensitive csMMP (which could occur immediately or almost immediately depending on the temperature of the liquid).

[0476] In another example, the temperature at the site of temperature-sensitive csMMP administration can be altered by a cold pack or a hot pack, depending on the particular enzyme and the permissive temperature required. For example, ice wraps, gel ice packs, cold therapy, ice packs, cold compress, ice blankets, or other similar items can be used to apply exogenous cooling and achieve permissive temperatures at the site of treatment. Hot packs or heating pads can be used to apply exogenous heating to achieve permissive temperatures at the site of treatment. In other words, the locus of administration of the temperature-sensitive csMMP can be exposed to the cold pack or hot pack in order to cool or warm the site of administration below or above the physiological temperature of the body, respectively, prior to, concurrently with or subsequent to administration of the temperature-sensitive csMMP to the same locus. For example, the cold pack can be frozen (e.g., ice pack), or can be a liquid cold pack maintained at a temperature that is less than physiological temperatures, and generally up to 4° C., 5° C., 6° C., 7° C., 8° C., 9° C., 10° C., 11° C., 12° C., 13° C., 14° C., 15° C. or more. A cold or hot pack can be applied directly to the locus of treatment, and generally is applied locally to the skin at the site of administration of the temperature-sensitive csMMP. One of skill in the art can empirically determine the length of time required for application depending of the particular target depth of the tissue that is being treated, the particular enzyme that is being used, and other factors based on known testing protocols or extrapolation from in vivo or in vitro test data. The hot pack or cold pack can be applied prior to, subsequent to, simultaneously with or intermittently with the temperature-sensitive csMMP. For example, if the particular enzyme is reversibly active, the cold pack can be applied intermittently over a course of hours or days in combination with administration of calcium. It is understood that it is customary for a subject to feel cold, aching and burning and numbness upon administration of a cold pack, and such symptoms can be monitored by the subject or a treating physician.

[0477] In aspects of the methods herein, exposure of the temperature-sensitive csMMP to the permissive temperature is generally not sufficient to render the temperature-sensitive csMMP sufficiently active in the absence of sufficient calcium to satisfy the increased calcium dependency of the enzyme. Thus, the calcium concentration at the site of temperature-sensitive csMMP administration is generally greater than the physiological calcium concentration (e.g., 10 mM), in addition to conditions providing the permissive temperature to activate the temperature-sensitive csMMP. Due to the physiologic temperature and calcium conditions in vivo, the temperature will eventually warm to the non-permissive temperature, and the calcium concentration will reduce to physiological levels following dissipation, sequestration, or uptake of Ca²⁺ ions, thereby resulting in inactivation of the enzyme and temporal control thereof.

[0478] In particular embodiments, the temperature-sensitive csMMP is exposed to a temperature that is at or below the permissive temperature of the body immediately before administration. For example, the temperature-sensitive csMMP is stored at a cold temperature and/or is reconstituted in a cold buffer. A permissive concentration of calcium (e.g., 10 mM Ca²⁺) also can be included in the reconstitution buffer or the calcium-containing formulation can be administered separate from the chilled temperature-sensitive csMMP-containing buffer. In some examples, the locus of administration of the temperature-sensitive csMMP also is exposed cold by exposure to a cold pack to cool the site of administration below the physiologic temperature of the body. In some examples, the locus of administration can be pre-treated with a calcium containing formulation that increases the calcium concentration at the locus of administration to a concentration that is above physiological levels. Upon administration of the temperature-sensitive csMMP, the temperature-sensitive csMMP is exposed to the permissive temperature (and calcium concentration), which will steadily return to the nonpermissive physiological interstitial calcium concentration and temperature of the body (e.g., about 37° C.). Where the temperature reaches the nonpermissive temperature or the calcium concentration decreases to concentrations below permissive conditions, the temperature-sensitive csMMP is rendered inactive or substantially inactive. Hence, activation of the temperature-sensitive csMMP is conditionally controlled. The duration of time of exposure to a permissive temperature below the physiological temperature of the body can be controlled by continued exposure to a cold pack, and calcium-containing formulations also can be administered as described elsewhere herein, to achieve activity at the site of administration for the predetermined length of time.

[0479] 3. Exemplary Fibrotic Diseases and Conditions (e.g., Collagen-Mediated Diseases and Conditions)

[0480] Among fibrotic diseases and conditions are those that are mediated by or associated with production or accumulation of collagen, and in particular type I or type II collagen. Type I collagen is generally found in tendon, bone, ligaments, scar tissue and Dupuytren's tissue. Type III collagen is generally found in tendon, scar, Dupuytren's tissue and granulation tissue. In many diseases and conditions, an underlying effect of tissue damage or other trauma is the production of collagen, including type I and type III collagen, that can result in the irregular formation of collagen fibers. These irregularly-formed collagen fibers can include fibrous septae, fibrous scars, fibrous plaques, cords, nodules and other fibrous structure. In the methods herein, the modified MMP conditionally or temporally severs the fibers, for example by cleavage or degradation of the collagen components therein, and thereby treats the disease or condition.

[0481] Descriptions of the involvement of collagen to collagen-mediated diseases or conditions is provided below as an example of the role of ECM components in diverse disease and conditions. Such descriptions are meant to be exemplary only and are not intended to limit the application of the methods provided herein to particular ECM-mediated diseases or conditions. One of skill in the art can select a method using a selected csMMP to treat any desired fibrotic or ECM-mediated disease, based on the ability of the selected enzyme to cleave or degrade the ECM component involved in the particular disease or condition. For example, as described herein, MMP-1 cleaves type I and type III collagens, such as those abundant in the skin. Hence, a csMMP-1 can be used for treatments, uses and processes for treating a collagen-mediated disease or condition. The particular treatment and dosage can be determined by one of skill in the art. Considerations in assessing treatment include, for example, the disease to be treated, the ECM component involved in the disease, the severity and course of the disease, whether the csMMP is administered for preventive or therapeutic purposes, previous therapy, the patient's clinical history and response to therapy, and the discretion of the attending physician.

[0482] Collagen is a major structural constituent of mammalian organisms and makes up a large portion of the total protein content of the skin and other parts of the animal body. Numerous diseases and conditions are associated with excess collagen deposition, for example, due to erratic accumulation of fibrous tissue rich in collagen or other causes. Collagen-mediated diseases or conditions (also referred to as fibrotic tissue disorders) are known to one of skill in the art (see e.g., published U.S. Application No. 2007/0224183; U.S. Pat. Nos. 6,353,028; 6,060,474; 6,566,331; and 6,294,350). Excess collagen has been associated with diseases and conditions, such as, but not limited to, fibrotic diseases or conditions resulting in scar formation, cellulite, Dupuytren's syndrome, Peyronie's disease, frozen shoulder, localized scleroderma, lymphedema, interstitial cystitis (IC), telangiectasia, Barrett's metaplasia, Pneumatosis cytoides intestinalis, collagenous colitis. For example, disfiguring conditions of the skin, such as wrinkling, cellulite formation and neoplastic fibrosis result from excessive collagen deposition, which produces unwanted binding and distortion of normal tissue architecture.

[0483] The methods provided herein use csMMPs, including but not limited to csMMP-1, to treat collagen-mediated diseases or conditions. The csMMPs used in the methods of treating collagen-mediated diseases are substantially active only when in the presence of sufficient concentrations of calcium, for example calcium concentrations that exceed physiological calcium concentrations, such as calcium concentrations at or greater than 2 mM Ca²⁺, for example 10 mM Ca²⁺. For example, temporary activation of a csMMP administered to the extracellular matrix, such as the skin interstitium, can be achieved by infusing or injecting a calcium-containing (i.e., activating) buffered solution or other liquid directly to the affected site and/or the locus of csMMP administration. In one example, a calcium-containing buffer can be administered via sub-epidermal administration, i.e., under the skin, such that administration is effected directly at the site where ECM components are present and accumulated. Other methods of calcium-based regulation of csMMP activity can be employed, and are known to one of skill in the art in view of the descriptions herein.

[0484] a. Cellulite

[0485] Modified MMP polypeptides, such as any of the csMMPs (e.g., csMMP-1) described herein, can be used in methods to treat cellulite (also known as edematous fibrosclerotic panniculophaty). In particular examples, the modified MMP is selected that cleaves or degrades a type I or type III collagen, which are the collagen types most abundant in the fibrous septae that cause dimpling associated with cellulite.

[0486] In normal adipose tissues, a fine mesh of blood vessels and lymph vessels supplies the tissue with necessary nutrients and oxygen, and takes care of the removal of metabolized products. For example, triglycerides are stored in individual adipocytes that are grouped into capillary rich lobules. Each fat lobule is composed of adipocytes. Vertical strands of collagen fibers named fibrous septae separate the fat lobules and tether the overlying superficial fascia to the underlying muscle.

[0487] Cellulite is typically characterized by dermal deterioration due to a breakdown in blood vessel integrity and a loss of capillary networks in the dermal and subdermal levels of the skin. The vascular deterioration tends to decrease the dermal metabolism. This decreased metabolism hinders protein synthesis and repair processes, which results in dermal thinning. The condition is further characterized by fat cells becoming engorged with lipids, swelling and clumping together, as well as excess fluid retention in the dermal and subdermal regions of the skin. The accumulation of fat globules or adipose cells creates a need for a bigger blood supply to provide extra nourishment. To provide the blood to tissues, new capillaries are formed, which release more filtrate resulting in a saturation of tissues with interstitial fluid causing edema in the adipose tissues. Abundant reticular fibers in the interstitial tissues accumulate and thicken around the aggregated adipose cells; they form capsules or septa, which gradually transform into collagen fibers and are felt as nodules. The formation of these septa further occludes fat cells. Collagen fibers are also laid down in the interstitial tissue spaces, rendering the connective tissue sclerotic (hard). Ultimately, cellulite presents by skin dimpling that occurs mainly on the pelvic region of women. The dimpling is caused when the fibrous septae, made of types I and III collagen, in the subcutaneous tissue connect the dermis to the deeper hypodermis. In cellulite, subcutaneous fat cells swell and push upwards while the septae act as an anchor to pull the epidermis downward to form the classic cellulite dimple lesion.

[0488] Cellulite is more prevalent among females than males. The prevalence of cellulite is estimated between 60% and 80% of the female population and its severity tends to worsen with obesity. One published study showed by in vivo magnetic resonance imaging that women with cellulite have a higher percentage of perpendicular fibrous septae than women without cellulite or men (Querleux et al. (2002) Skin Res. Technol. 8:118-124). Cellulite occurs most often on the hips, thighs and upper arms. For example, premenopausal females tend to accumulate fat subcutaneously, primarily in the gluteal/thigh areas where cellulite is most common. Clinically, cellulite is accompanied by symptoms that include thinning of the epidermis, reduction and breakdown of the microvasculature leading to subdermal accumulations of fluids, and subdermal agglomerations of fatty tissues.

[0489] b. Dupuytren's Disease

[0490] Modified MMP polypeptides, such as any of the csMMPs (e.g., csMMP-1) described herein, can be used in to treat Dupuytren's syndrome (also called Dupuytren's contracture). In particular examples, the modified MMP is selected that cleaves or degrades type I or type III collagen, which are the collagen types most abundant in the fibrous cords or nodules associated with this disease.

[0491] Dupuytren's contracture (also known as Morbus Dupuytren) is a fixed flexion contracture of the hand where the fingers bend towards the palm and cannot be fully extended. A similar lesion sometimes occurs in the foot. The connective tissue within the hand becomes abnormally thick and is accompanied by the presence of nodules containing fibroblasts and collagen, particularly type III collagen. The fibrous cord of collagen is often interspersed with a septa-like arrangement of adipose tissue. These present clinically as mattress-type “lumps” of varying sized and in Dupuytren's disease are termed nodules. This can cause the fingers to curl, and can result in impaired function of the fingers, especially the small and ring fingers. Dupuytren's disease occurs predominantly in men. It is generally found in middle aged and elderly persons, those of Northern European ancestry, and in those with certain chronic illnesses such as diabetes, alcoholism and smoking.

[0492] Dupuytren's disease is a slowly progressive disease that occurs over many years causing fixed flexion deformities in the metacarpophalangeal (MP) and proximal interphalangeal (PIP) joints of the fingers. The small and ring fingers are the most often affected. The disease progresses through three stages (Luck et al. (1959) J. Bone Joint Surg. 41A:635-664). The initial proliferative stage is characterized by nodule formation in the palmar fascia in which a cell known as the myofibroblast appears and begins to proliferate. The involutional or mid-disease stage involves myofibroblast proliferation and active type III collagen formation. In the last or residual phase, the nodule disappears leaving acellular tissue and thick bands of collagen. The ratio of type III collagen to type I collagen increases.

[0493] Treatment of Dupuytren's disease with a modified MMP, such as any csMMP provided herein, is typically in the mid-disease and residual disease stages. The modified MMP is generally injected directly into the cord. The injection can be repeated, if necessary. Also, the treatment can optionally include a finger extension procedure in order to further break up the cord. Finger extension exercises also can be employed following injection.

[0494] c. Peyronie's Disease

[0495] Modified MMP polypeptides, such as any of the csMMPs (e.g., csMMP-1) described herein, can be used in methods to treat Peyronie's disease. In particular examples, the modified MMP is selected that cleaves or degrades type I or type III collagen, which are the collagen types most abundant in the fibrous plaques associated with this disease.

[0496] Peyronie's disease is a connective tissue disorder involving the growth of fibrous plaques in the soft tissue of the penis affecting as many as 1-4% of men. Collagen, and principally type I and type III collagen fibers, are the major component of the plaque in Peyronie's disease (see e.g., Bivalacqua et al. (2000) Curr. Urol. Reports 1:297-301). Specifically, the fibrosing process occurs in the tunica albuginea, a fibrous envelope surrounding the penile corpora cavernosa. The pain and disfigurement associated with Peyronie's disease relate to the physical structure of the penis in which is found two erectile rods, called the corpora cavernosa, a conduit (the urethra) through which urine flows from the bladder, and the tunica which separates the cavernosa from the outer layers of skin of the penis. A person exhibiting Peyronie's disease will have formation(s) of plaque or scar tissue between the tunica and these outer layers of the skin (referred to as “sub-dermal” in this application). The scarring or plaque accumulation of the tunica reduces its elasticity causes such that, in the affected area, it will not stretch to the same degree (if at all) as the surrounding, unaffected tissues. Thus, the erect penis bends in the direction of the scar or plaque accumulation, often with associated pain of some degree. In all but minor manifestations of Peyronie's disease, the patient has some degree of sexual dysfunction. In more severe cases, sexual intercourse is either impossible, or is so painful as to be effectively prohibitive.

[0497] Empirical evidence indicates an incidence of Peyronie's disease in approximately one percent of the male population. Although the disease occurs mostly in middle-aged men, younger and older men can acquire it. About 30 percent of men with Peyronie's disease also develop fibrosis (hardened cells) in other elastic tissues of the body, such as on the hand or foot. Common examples of such other conditions include Dupuytren's contracture of the hand and Ledderhose Fibrosis of the foot.

[0498] d. Ledderhose Fibrosis

[0499] Modified MMP polypeptides, such as any of the csMMPs (e.g., csMMP-1) described herein, can be used in methods to treat Ledderhose fibrosis. In particular examples, the modified MMP is selected that cleaves or degrades type I or type III collagen, which are the collagen types most abundant in the plantar fibrosis associated with this disease. Ledderhose fibrosis is similar to Dupuytren's disease and Peyronie's disease, except that the fibrosis due to fibroblast proliferation and collagen deposition, principally type I or type III collagen, occurs in the foot. Ledderhose disease is characterized by plantar fibrosis over the medial sole of the foot, and is sometimes referred to as plantar fibrosis.

[0500] e. Stiff Joints

[0501] Modified MMP polypeptides, such as any of the csMMPs (e.g., csMMP-1) described herein, can be used in methods to treat stiff joints, for example, frozen shoulder. In particular examples, the modified MMP is selected that cleaves or degrades type I or type III collagen, which are the collagen types most abundant in the fibrous capsule associated with this disease.

[0502] Frozen shoulder (adhesive capsulitis) is a chronic fibrozing condition of the capsule of the joint characterized by pain and loss of motion or stiffness in the shoulder. It affects about 2% of the general population. Frozen shoulder results from increased fibroblast matrix synthesis. The synthesis is caused by an excessive inflammatory response resulting in the overproduction of cytokines and growth factors. Fibroblasts and myofibroblasts lay down a dense matrix of collagen in particular, type-I and type-III collagen within the capsule of the shoulder. This results in a scarred contracted shoulder capsule and causes joint stiffness.

[0503] Other examples of stiff joints include, but are not limited to, those caused by capsular contractures, adhesive capsulitis and arthrofibrosis, which result from musculoskeletal surgery. Such stiff joints can occur in joints, including, for example, joints of the knees, shoulders, elbows, ankles and hips. Like frozen shoulder, such joint diseases are caused by increased matrix synthesis and scar formation. The stiff joints inevitably can cause abnormally high forces to be transmitted to the articular cartilage of the affected area. Over time, these forces result in the development of degenerative joint disease and arthritis. For example, in arthrofibrosis and capsular contracture, fibroblasts form excessive amounts of matrix in response to local trauma, such as joint dislocation.

[0504] f. Existing Scars

[0505] Modified MMP polypeptides, such as any of the csMMPs (e.g., csMMP-1) described herein, can be used in methods to treat existing scars. In particular examples, the modified MMP is selected that cleaves or degrades type I or type III collagen, which are the collagen types found in scar tissue.

[0506] Collagen is particularly important in the wound healing process and in the process of natural aging, where it is produced by fibroblast cells. In some cases, however, an exaggerated healing response can result in the production of copious amounts of healing tissue (ground substance), also termed scar tissue. For example, various skin traumas such as burns, surgery, infection, wounds and accident are often characterized by the erratic accumulation of fibrous tissue rich in collagen, and particular type I or type III collagen. There also is often an increased proteoglycan content. In addition to the replacement of the normal tissue that has been damaged or destroyed, excessive and disfiguring deposits of new tissue sometimes form during the healing process. The excess collagen deposition has been attributed to a disturbance in the balance between collagen synthesis and collagen degradation. Including among scars are, for example, chronic tendinosis or scar tissue of the tendons, surgical adhesions, keloids, hypertrophic scars, and depressed scars.

[0507] i. Surgical Adhesions

[0508] Modified MMP polypeptides, such as any of the csMMPs (e.g., csMMP-1) described herein, can be used in methods to treat surgical adhesions. In particular examples, the modified MMP is selected that cleaves or degrades type I or type III collagen, which are the collagen types found in surgical scars.

[0509] Surgical adhesions are attachments of organs or tissues to each other through scar formation, which can cause severe clinical problems. The adhesions are fibrous bands that form between tissues and organs. The formation of some scar tissue after surgery or tissue injury is normal. In some cases, however, the scar tissue overgrows the region of injury and creates surgical adhesions, which tend to restrict the normal mobility and function of affected body parts. As the fibrous adhesions persist, tissue repair cells (e.g., macrophages or fibroblasts), lay down collagen (e.g., type I or type III collagen) and other matrix substances to form a permanent fibrous adhesion. In particular, fibroblast proliferation and matrix synthesis is increased locally following such soft tissue injury. Adhesions then form when the body attempts to repair tissue by inducing a healing response. For example, this healing process can occur between two or more otherwise healthy separate structures (such as between loops of bowel following abdominal surgery). Alternately, following local trauma to a peripheral nerve, fibrous adhesions can form, resulting in severe pain during normal movement.

[0510] ii. Keloids

[0511] Modified MMP polypeptides, such as any of the csMMPs (e.g., csMMP-1) described herein, can be used in methods to treat keloids. In particular examples, the modified MMP is selected that cleaves or degrades type I or type III collagen, which are the collagen types found in the fibrous nodules of keloids.

[0512] Keloids are scars of connective tissue containing hyperplastic masses that occur in the dermis and adjacent subcutaneous tissue, most commonly following trauma. Keloids generally are fibrous nodules that can vary in color from pink or red to dark brown. Keloids form in scar tissue as a result of overgrowth of collagen, which participates in wound repair. Keloids are composed mainly of type III or type I collagen. Keloid lesions are formed when local skin fibroblasts undergo vigorous hyperplasia and proliferation in response to local stimuli. The resulting lesion can result in a lump many times larger than the original scar. In addition to occur as a result of wound or other trauma, keloids also can form from piercing, pimples, a scratch, severe acne, chickenpox scarring, infection at a wound site, repeated trauma to an area, or excessive skin tension during wound closure.

[0513] iii. Hypertrophic Scars

[0514] Modified MMP polypeptides, such as any of the csMMPs (e.g., csMMP-1) described herein, can be used in methods to treat hypertrophic scars. In particular examples, the modified MMP is selected that cleaves or degrades type III collagen, which is the collagen types found in the hypertrophic scars.

[0515] Hypertrophic scars are similar to keloids, except that they do not generally extend beyond the initial site of injury. For example, hypertrophic scars are generally raised scars that form at the site of wounds. They generally do not grow beyond the boundaries of the original wound. Like keloid scars, hypertrophic scars are a result of the body overproducing collagen. They generally form within 4 to 8 weeks following. wound infection or other traumatic injury. Like keloid scars, hypertrophic scars contain an overabundance of dermal collagen, primarily type III collagen.

[0516] g. Scleroderma

[0517] Modified MMP polypeptides, such as any of the csMMPs (e.g., csMMP-1) described herein, can be used in methods to treat scleroderma. In particular examples, the modified MMP is selected that cleaves or degrades type I collagen, which is the collagen types found the thickened skin associated with scleroderma.

[0518] Scleroderma is characterized by a thickening of the collagen. In particular, increased deposition of type I collagen is evident in the skin and involved internal organs. The more common form of the disease, localized scleroderma, affects only the skin, usually in just a few places, and sometimes the face. It is sometimes referred to as CREST syndrome. Symptoms include hardening of the skin and associated scarring. The skin also appears reddish or scaly, and blood vessels can be more visible. In more serious cases, scleroderma can affect the blood vessels and internal organs. Diffuse scleroderma can be fatal as a result of heart, kidney lung or intestinal damage, due to musculoskeletal, pulmonary, gastrointestinal, renal and other complications.

[0519] The condition is characterized by collagen buildup leading to loss of elasticity. The overproduction of collagen has been attributed to autoimmune dysfunction, resulting in accumulation of T cells and production of cytokines and other proteins that stimulate collagen deposition from fibroblasts.

[0520] h. Lymphedema

[0521] Modified MMP polypeptides, such as any of the csMMPs (e.g., csMMP-1) described herein, can be used in methods to treat lymphedema. In particular examples, the modified MMP is selected that cleaves or degrades type I or type III collagen, which is the collagen types found the skin of subjects with lymphedema.

[0522] Lymphedema is an accumulation of lymphatic fluid that causes swelling in the arms and legs. Lymphedema can progress to include skin changes such as, for example, lymphostatic fibrosis, sclerosis and papillomas (benign skin tumors) and swelling. Tissue changes associated with lymphedema include proliferation of connective tissue cells, such as fibroblasts, production of collagen fibers, an increase in fatty deposits and fibrotic changes. These changes occur first at the lower extremities, i.e. the fingers and toes. Lymphedema can be identified based on the degree of enlargement of the extremities. For example, one method to assess lymphedema is based on identification of 2-cm or 3-cm difference between four comparative points of the involved and uninvolved extremities.

[0523] i. Collagenous colitis

[0524] Calcium-sensitive MMPs, such as csMMP-1, can be used in methods to treat collagenous colitis. Collagenous colitis was first described as chronic watery diarrhea (Lindstrom et al. (1976) Pathol. Eur. 11:87-89). Collagenous colitis is characterized by collagen deposition, likely resulting from an imbalance between collagen production by mucosal fibroblasts and collagen degradation. It results in secretory diarrhea. The incidence of collagenous colitis is similar to primary biliary cirrhosis. The disease has an annual incidence of 1.8 per 100,000 and a prevalence of 15.7 per 100,000, which is similar to primary biliary cirrhosis (12.8 per 100,000) and lower than ulcerative colitis (234 per 100,000), Crohn's disease (146 per 100,000) or celiac disease (5 per 100,000). In patients with chronic diarrhea, about 0.3 to 5% have collagenous colitis. Collagenous colitis is an inflammatory disease resulting in increased production of cytokines and other agents that stimulate the proliferation of fibroblasts, resulting in increased collagen accumulation.

[0525] 2. Spinal Pathologies

[0526] As described herein, the methods using csMMPs provided herein can be used to treat diseases and conditions of the ECM or involving the ECM. These include spinal pathologies, typically referred to as herniated disc or bulging discs, that can be treated by methods of administering a csMMP, and enabling temporary activation thereof, by regulating the concentration of calcium available to the administered csMMP, as described herein. Herniated discs that can be treated using the methods provided herein include protruded and extruded discs. A protruded disc is one that is intact but bulging. In an extruded disk, the fibrous wrapper has torn and nucleus pulposus (NP) has oozed out, but is still connected to the disk. While the NP is not the cause of the herniation, the NP contributes to pressure on the nerves, causing pain. The NP contains hyaluronic acid, chondrocytes, collagen fibrils, and proteoglycan aggrecans that have hyaluronic long chains which attract water. Attached to each hyaluronic chain are side chains of chondroitin sulfate and keratan sulfate.

[0527] Herniated discs have been treated with chemonucleolytic drugs, such as chymopapain and a collagenase, typically by local introduction of the drug into the disc. A chemonucleolytic drug degrades one or more components of the NP, thereby relieving pressure. Chemonucleolysis is effective on protruded and extruded disks. Chemonucleolysis has been used treat lumbar (lower) spine and cervical (upper spine) hernias. Hence, the csMMPs provided herein can be used as chemonucleolytic drugs and administered, such as by injection, to the affected disc, under conditions that activate the csMMP.

### I. COMBINATION THERAPIES

[0528] Any of the modified MMP polypeptides described herein can be further co-formulated or co-administered together with, prior to, intermittently with, or subsequent to, other therapeutic or pharmacologic agents or procedures. Therapeutic or pharmacologic agents that can be co-formulated or co-administered with csMMP polypeptides include, but are not limited to, other biologics, small molecule compounds, dispersing agents, anesthetics, vasoconstrictors and surgery, and combinations thereof. For example, for any disease or condition, including all those exemplified above, for which other agents and treatments are available, selected csMMPs for such diseases and conditions can be used in combination therewith. In another example, a local anesthetic, for example, lidocaine can be administered to provide pain relief. In some examples, the anesthetic can be provided in combination with a vasoconstrictor to increase the duration of the anesthetic effects. Any of the pharmacological agents provided herein can be combined with a dispersion agent that facilitates access into the tissue of pharmacologic agents, for example, following subcutaneous administration. Such substances are known in the art and include, for example, soluble glycosaminoglycanase enzymes such as members of the hyaluronidase glycoprotein family (US 2005/0260186, US 2006/0104968).

[0529] 1. Anesthesia and Vasoconstrictors

[0530] Compositions of modified csMMPs, used in the methods provided herein, can be co-formulated or co-administered with a local anesthesia. Anesthetics include short-acting and long-lasting local anesthetic drug formulations. Short-acting local anesthetic drug formulations contain lidocaine or a related local anesthetic drug dissolved in saline or other suitable injection vehicle. Typically, local anesthesia with short-acting local anesthetics last approximately 20-30 minutes. Exemplary anesthetics include, for example, non-inhalation local anesthetics such as ambucaines; amoxecaines; amylocalnes; aptocaines; articaines; benoxinates; benzyl alcohols; benzocaines; betoxycaines; biphenamines; bucricaines; bumecaines; bupivacaines; butacaines; butambens; butanilicaines; carbizocaines; chloroprocaine; clibucaines; clodacaines; cocaines; dexivacaines; diamocaines; dibucaines; dyclonines; elucaines; etidocaines; euprocins; fexicaines; fomocaines; heptacaines; hexylcaines; hydroxyprocaines; hydroxytetracaines; isobutambens; ketocaines; leucinocaines; lidocaines; mepivacaines; meprylcaines; octocaines; orthocaines; oxethacaines; oxybuprocaines; phenacaines; pinolcaines; piperocaines; piridocaines; polidocanols; pramocaines; prilocalnes; procaines; propanocaines; propipocaines; propoxycaines; proxymetacaines; pyrrocaines; quatacaines; quinisocaines; risocaines; rodocaines; ropivacaines; salicyl alcohols; suicaines; tetracaines; trapencaines; and trimecaines; as well as various other non-inhalation anesthetics such as alfaxalones; amolanones; etoxadrols; fentanyls; ketamines; levoxadrols; methiturals; methohexitals; midazolams; minaxolones; propanidids; propoxates; pramoxines; propofols; remifentanyls; sufentanyls; tiletamines; and zolamine. The effective amount in the formulation will vary depending on the particular patient, disease to be treated, route of administration and other considerations. Such dosages can be determined empirically.

[0531] Due to the short half-life of local anesthetics, it is often desirable to co-administer or co-formulate such anesthetics with a vasoconstrictor. Examples of vasoconstrictors include alpha adrenergic receptor agonists including catecholamines and catecholamine derivatives. Particular examples include, but are not limited to, levonordefrin, epinephrine and norepinephrine. For example, a local anesthetic formulation, such as lidocaine, can be formulated to contain low concentrations of epinephrine or another adrenergic receptor agonist such as levonordefrin. Combining local anesthetics with adrenergic receptor agonists is common in pharmaceutical preparations (see e.g., U.S. Pat. Nos. 7,261,889 and 5,976,556). The vasoconstrictor is necessary to increase the half-life of anesthetics. The vasoconstrictor, such as epinephrine, stimulates alpha-adrenergic receptors on the blood vessels in the injected tissue. This has the effect of constriction the blood vessels in the tissue. The blood vessel constriction causes the local anesthetic to stay in the tissue much longer, resulting in a large increase in the duration of the anesthetic effect.

[0532] Generally, a vasoconstrictor is used herein in combination with an anesthetic. The anesthetic agent and vasoconstrictor can be administered together as part of a single pharmaceutical composition or as part of separate pharmaceutical compositions acting together to prolong the effect of the anesthesia, so long as the vasoconstrictor acts to constrict the blood vessels in the vicinity of the administered anesthetic agent. In one example, the anesthetic agent and vasoconstrictor are administered together in solution. In addition, the anesthetic agent and vasoconstrictor can be formulated together or separate from the modified MMP and/or calcium-containing compositions. Single formulations are preferred. The anesthetic agent and vasoconstrictor can be administered by injection, by infiltration or by topical administration, e.g., as part of a gel or paste. Typically, the anesthetic agent and vasoconstrictor are administered by injection directly into the site to be anesthetized, for example, by subcutaneous administration. The effective amount in the formulation will vary depending on the particular patient, disease to be treated, route of administration and other considerations. Such dosages can be determined empirically. For example, exemplary amounts of lidocaine are or are about 10 mg to 1000 mg, 100 mg to 500 mg, 200 mg to 400 mg, 20 mg to 60 mg, or 30 mg to 50 mg. The dosage of lidocaine administered will vary depending on the individual and the route of administration. Epinephrine can be administered in amounts such as, for example, 10 μg to 5 mg, 50 μg to 1 mg, 50 μg to 500 μg, 50 μg to 250 μg, 100 μg to 500 μg, 200 μg to 400 μg, 1 mg to 5 mg or 2 mg to 4 mg. Typically, epinephrine can be combined with lidocaine in a 1:100,000 to 1:200,000 dilution, which means that 100 mL of anesthetic contains 0.5 to 1 mg of epinephrine. Volumes administered can be adjusted depending on the disease to be treated and the route of administration. It is contemplated herein that 1-100 mL, 1-50 mL, 10-50 mL, 10-30 mL, 1-20 mL, or 1-10 mL, typically 10-50 mL of an anesthetic/vasoconstrictor formulation can be administered subcutaneously for the treatment of an ECM-mediated disease or condition, such as cellulite. The administration can be subsequent, simultaneous or intermittent with administration of an modified MMP and/or high-calcium containing composition.

[0533] 2. Dispersion Agent

[0534] Compositions of modified MMP polypeptides, for example csMMPs, provided herein also can be co-formulated or co-administered with a dispersion agent. The dispersion agent also can be co-formulated or co-administered with other pharmacological agents, such as anesthetics, vasoconstrictors, or other biologic agents. Exemplary of dispersion agents are glycosaminoglycanases that open channels in the interstitial space through degradation of glycosaminoglycans. These channels can remain relatively open for a period of 24-48 hours depending on dose and formulation. Such channels can be used to facilitate the diffusion of exogenously added molecules such as fluids, small molecules, proteins (such as matrix degrading enzymes), nucleic acids and gene therapy vectors and other molecules less than about 500 nm in size. In addition, it is thought that the formation of such channels can facilitate bulk fluid flow within an interstitial space, which can in turn promote the dispersion or movement of a solute (such as a detectable molecule or other diagnostic agent, an anesthetic or other tissue-modifying agent, a pharmacologic or pharmaceutically effective agent, or a cosmetic or other esthetic agent) that is effectively carried by the fluid in a process sometimes referred to as “convective transport” or simply convection. Such convective transport can substantially exceed the rate and cumulative effects of molecular diffusion and can thus cause the therapeutic or other administered molecule to more rapidly and effectively perfuse a tissue. Furthermore, when an agent, such as a csMMP, anesthetic or other agent, is co-formulated or co-administered with a glycosaminoglycanase and both are injected into a relatively confined local site, such as a site of non-intravenous parenteral administration (e.g., intradermal, subcutaneous, intramuscular, or into or around other internal tissues, organs or other relatively confined spaces within the body), then the fluid associated with the administered dose can both provide a local driving force (i.e. hydrostatic pressure) as well as lower impedance to flow (by opening channels within the interstitial matrix), both of which could increase fluid flow, and with it convective transport of the therapeutic agent or other molecule contained within the fluid. As a result, the use of glycosaminoglycanases can have substantial utility for improving the bioavailability as well as manipulating other pharmacokinetic and/or pharmacodynamic characteristics of co-formulated or co-administered agents, such as matrix degrading enzymes.

[0535] Hyaluronidases

[0536] Exemplary of glycosaminoglycanases are hyaluronidases. Hyaluronidases are a family of enzymes that degrade hyaluronic acid. By catalyzing the hydrolysis of hyaluronic acid, a major constituent of the interstitial barrier, hyaluronidase lowers the viscosity of hyaluronic acid, thereby increasing tissue permeability. There are three general classes of hyaluronidases: Mammalian-type hyaluronidases, (EC 3.2.1.35; e.g., SEQ ID NOS:93-97, 106-121) which are endo-beta-N-acetylhexosaminidases with both hydrolytic and transglycosidase activities, and can degrade hyaluronan and chondroitin sulfates (CS), generally C4-S and C6-S, with tetrasaccharides and hexasaccharides as the major end products; Bacterial hyaluronidases (EC 4.2.99.1; e.g., SEQ ID NOS:122-129), which are endo-beta-N-acetylhexosaminidases that operate by a beta elimination reaction to degrade hyaluronan and to various extents, CS and DS, to yield primarily disaccharide end products; and Hyaluronidases (EC 3.2.1.36) from leeches, other parasites, and crustaceans that are endo-beta-glucuronidases that generate tetrasaccharide and hexasaccharide end products through hydrolysis of the beta 1-3 linkage.

[0537] There are six hyaluronidase-like genes in the human genome, HYAL1 (SEQ ID NO:93), HYAL2 (SEQ ID NO:94), HYAL3 (SEQ ID NO:95), HYAL4 (SEQ ID NO:96), PH20/SPAM1 (SEQ ID NO:97) and one expressed pseudogene, HYALP1. Among hyaluronidases, PH20 is the prototypical neutral active enzyme, while the others exhibit no catalytic activity towards hyaluronan or any known substrates, or are active only under acidic pH conditions. The hyaluronidase-like enzymes can also be characterized by those which are generally locked to the plasma membrane via a glycosylphosphatidyl inositol anchor such as human HYAL2 and human PH20 (Danilkovitch-Miagkova et al. (2003) Proc. Natl. Acad. Sci. U.S.A. 100(8):4580-4585), and those which are generally soluble such as human HYAL1 (Frost et al. (1997) Biochem. Biophys. Res. Commun. 236(1):10-15). N-linked glycosylation of some hyaluronidases can be very important for their catalytic activity and stability. While altering the type of glycan modifying a glycoprotein can have dramatic effects on a protein's antigenicity, structural folding, solubility, and stability, many enzymes are not thought to require glycosylation for optimal enzyme activity. Hyaluronidases are, therefore, unique in this regard, in that removal of N-linked glycosylation can result in near complete inactivation of the hyaluronidase activity. For such hyaluronidases, the presence of N-linked glycans is critical for generating an active enzyme.

[0538] Human PH20 (also known as sperm surface protein PH20) is naturally involved in sperm-egg adhesion and aids penetration by sperm of the layer of cumulus cells by digesting hyaluronic acid. The PH20 mRNA transcript (corresponding to nucleotides 1058-2503 of the sequence set forth in SEQ ID NO:98) is normally translated to generate a 509 amino acid precursor protein containing a 35 amino acid signal sequence at the N-terminus (amino acid residue positions 1-35) and a 19 amino acid GPI anchor at the C-terminus (corresponding to amino acid residues 491-509). The precursor sequence is set forth in SEQ ID NO:97. An mRNA transcript containing a mutation of C to T at nucleotide position 2188 of the sequence of nucleic acids set forth in SEQ ID NO:98 also exists and is a silent mutation resulting in the translated product set forth in SEQ ID NO:97. The mature PH20 is, therefore, a 474 amino acid polypeptide corresponding to amino acids 36-509 of the sequence of amino acids set forth in SEQ ID NO:97. There are potential N-linked glycosylation sites required for hyaluronidases activity at N82, N166, N235, N254, N368, N393, N490 of human PH20 exemplified in SEQ ID NO:97. Disulfide bonds form between the cysteine residues C60 and C351 and between C224 and C238 (corresponding to amino acids set forth in SEQ ID NO:97) to form the core hyaluronidase domain. Additional cysteine residues are required in the carboxy terminus for neutral enzyme catalytic activity such that amino acids 36 to 464 of SEQ ID NO:97 contain the minimally active human PH20 hyaluronidase domain.

[0539] Soluble forms of recombinant human PH20 have been produced and can be used in the methods described herein for co-administration or co-formulation with csMMPs, activating or deactivating formulations, anesthetics, vasoconstrictors, other pharmacologic or therapeutic agents, or combinations thereof, to permit the diffusion into tissues. The production of such soluble forms of PH20 is described in related application Ser. No. 11/065,716 (now U.S. Pat. No. 7,871,607) and Ser. No. 11/238,171. Soluble forms include, but are not limited to, any having C-terminal truncations to generate polypeptides containing amino acid 1 to amino acid 442, 443, 444, 445, 446 and 447 of the sequence of amino acids set forth in SEQ ID NOS:100-105. Examples of such polypeptides are those generated from a nucleic acid molecule encoding amino acids 1-482 set forth in SEQ ID NO:99. Resulting purified rHuPH20 can be heterogenous due to peptidases present in the culture medium upon production and purification. Generally, soluble forms of PH20 are produced using protein expression systems that facilitate correct N-glycosylation to ensure the polypeptide retains activity, since glycosylation is important for the catalytic activity and stability of hyaluronidases. Such cells include, for example Chinese Hamster Ovary (CHO) cells (e.g., DG44 CHO cells).

[0540] The soluble PH20 can be administered by any suitable route as described elsewhere herein. Typically, administration is by parenteral administration, such as by intradermal, intramuscular, subcutaneous or intravascular administration. The compounds provided herein can be formulated for parenteral administration by injection, e.g., by bolus injection or continuous infusion. Formulations for injection can be presented in unit dosage form, e.g., in ampoules or in multi-dose containers, with an added preservative. The compositions can be suspensions, solutions or emulsions in oily or aqueous vehicles, and can contain formulatory agents such as suspending, stabilizing and/or dispersing agents. Alternatively, the active ingredient can be in powder form for reconstitution with a suitable vehicle, e.g., sterile pyrogen-free water or other solvents, before use. For example, provided herein are parenteral formulations containing an effective amount of soluble PH20, such as 10 Units to 500,000 Units, 100 Units to 100,000 Units, 500 Units to 50,000 Units, 1000 Units to 10,000 Units, 5000 Units to 7500 Units, 5000 Units to 50,000 Units, or 1,000 Units to 10,000 Units, generally 10,000 to 50,000 Units, in a stabilized solution or suspension or a lyophilized from. The formulations can be provided in unit-dose forms such as, but not limited to, ampoules, syringes and individually packaged tablets or capsules. The dispersing agent can be administered alone, or with other pharmacologically effective agents in a total volume of 1-100 mL, 1-50 mL, 10-50 mL, 10-30 mL, 1-20 mL, or 1-10 mL, typically 10-50 mL.

[0541] In one example of a combination therapy, it is contemplated herein that an anesthetic, vasoconstrictor and dispersion agent are co-administered or co-formulated with a csMMP to be administered subsequently, simultaneously or intermittently therewith. An exemplary formulation is one containing lidocaine, epinephrine and a soluble PH20, for example, a soluble PH20 set forth in SEQ ID NO:100. Soluble PH20 can be mixed directly with lidocaine (Xylocalne®), and optionally with epinephrine. The formulation can be prepared in a unit dosage form, such as in a syringe. For example, the lidocaine/epinephrine/soluble PH20 formulation can be provided in a volume such as 1-100 mL, 1-50 mL, 10-50 mL, 10-30 mL, 1-20 mL, or 1-10 mL, typically 10-50 mL, prepackaged in a syringe for use.

[0542] In the combination therapies, the other pharmacologic agents, such as a lidocaine/epinephrine/soluble PH20 formulation, can be co-administered together with or in close temporal proximity to the administration of a modified MMP and/or calcium-containing composition. Typically, it is preferred that an anesthetic and/or dispersion agent be administered shortly before (e.g., 5 to 60 minutes before) or, for maximal convenience, together with the pharmacologic agent. As will be appreciated by those of skill in the art, the desired proximity of co-administration depends in significant part on the effective half-lives of the agents in the particular tissue setting, and the particular disease being treated, and can be readily optimized by testing the effects of administering the agents at varying times in suitable models, such as in suitable animal models.

### J. EXAMPLES

[0543] The following examples are included for illustrative purposes only and are not intended to limit the scope of the invention.

### Example 1

### Generation and Expression of hMMP-1 and hMMP-1 Mutant Library

[0544] A. Generation of MMP-1 Library of Single Amino Acid Variants

[0545] A human matrix metalloprotease 1 (hMMP-1) library was created by cloning DNA encoding human MMP-1 into a plasmid followed by mutagenesis, transformation and protein expression/isolation. The library was created by introducing mutations in a parent human MMP-1 DNA sequence having the sequence of nucleotides set forth in SEQ ID NO:3, which encodes the inactive zymogen proMMP-1 (set forth in SEQ ID NO:2), to generate single amino acid variants of MMP-1 across the catalytic domain and proline rich linker domain of the polypeptide. The hMMP-1 library was designed to contain at least 15 amino acid substitutions (replacements) at each of 178 amino acids positions within the catalytic domain (amino acids 81-242 of SEQ ID NO:2) and the linker region (amino acids 243-258 of SEQ ID NO:2) of human MMP-1. The cDNA encoding each individual hMMP-1 mutant was generated by changing the wild-type codon encoding each of the 178 amino acids positions to a codon encoding the desired amino acid substitution. Table 9 depicts the codon change and the resulting amino acid substitutions (replacements) at each of the amino acid positions.

[0546] The mutant MMP-1s have a sequence of nucleotides that is substantially the same as set forth in SEQ ID NO:3, except that the respective wild-type codon is substituted as set forth in Table 9. The encoded amino acid sequence of the mutant MMPs also is substantially the same as set forth in SEQ ID NO:2), except that the polypeptide contains the single amino acid replacement compared to wild-type MMP-1 set forth in SEQ ID NO:2. The DNA encoding each individual library member was generated according to standard DNA synthesis protocols and protein was expressed using routine molecular biology techniques. Briefly, the DNA was ligated into vector pET303CTHis (Invitrogen, SEQ ID NO:90) using routine molecular biology techniques.

TABLE 9
Codons encoding each amino acid substitution

| Mutation | Codon |
|---|---|
| F81C | TGT |
| F81E | GAG |
| F81I | ATT |
| F81L | CTG |
| F81P | CCT |
| F81S | TCT |
| F81A | GCG |
| F81M | ATG |
| F81G | GGG |
| F81T | ACG |
| F81Q | CAG |
| F81R | CGT |
| F81W | TGG |
| F81H | CAT |
| F81V | GTG |
| V82I | ATT |
| V82C | TGT |
| V82A | GCG |
| V82P | CCG |
| V82Y | TAT |
| V82M | ATG |
| V82Q | CAG |
| V82F | TTT |
| V82W | TGG |
| V82N | AAT |
| V82R | CGT |
| V82G | GGT |
| V82S | TCG |
| V82L | TTG |
| V82T | ACT |
| L83A | GCG |
| L83C | TGT |
| L83D | GAT |
| L83E | GAG |
| L83G | GGT |
| L83H | CAT |
| L83I | ATT |
| L83M | ATG |
| L83P | CCG |
| L83Q | CAG |
| L83R | CGG |
| L83S | AGT |
| L83T | ACG |
| L83W | TGG |
| L83Y | TAT |
| T84V | GTT |
| T84E | GAG |
| T84H | CAT |
| T93G | GGG |
| T93K | AAG |
| T93E | GAG |
| H94L | CTG |
| H94S | TCG |
| H94M | ATG |
| H94R | CGG |
| H94E | GAG |
| H94I | ATT |
| H94D | GAT |
| H94P | CCG |
| H94A | GCG |
| H94N | AAT |
| H94F | TTT |
| H94G | GGG |
| H94T | ACT |
| H94V | GTG |
| H94W | TGG |
| L95E | GAG |
| L95Y | TAT |
| L95R | CGG |
| L95A | GCT |
| L95G | GGG |
| L95K | AAG |
| L95S | AGT |
| L95T | ACG |
| L95H | CAT |
| L95W | TGG |
| L95V | GTG |
| L95C | TGT |
| L95P | CCT |
| L95D | GAT |
| L95I | ATT |
| T96E | GAG |
| T96R | CGG |
| T96P | CCG |
| T96S | TCG |
| T96A | GCG |
| T96L | TTG |
| T96W | TGG |
| T96N | AAT |
| T96G | GGT |
| T96F | TTT |
| T96Q | CAG |
| T96H | CAT |
| T96V | GTT |
| T96I | ATT |
| T96C | TGT |
| L106T | ACG |
| L106V | GTG |
| L106H | CAT |
| L106F | TTT |
| L106I | ATT |
| L106C | TGT |
| L106S | TCT |
| P107L | TTG |
| P107W | TGG |
| P107T | ACT |
| P107S | TCG |
| P107R | CGG |
| P107Y | TAT |
| P107M | ATG |
| P107V | GTG |
| P107D | GAT |
| P107A | GCG |
| P107C | TGT |
| P107K | AAG |
| P107F | TTT |
| P107I | ATT |
| P107G | GGT |
| R108P | CCT |
| R108G | GGT |
| R108T | ACG |
| R108E | GAG |
| R108A | GCG |
| R108Y | TAT |
| R108K | AAG |
| R108C | TGT |
| R108S | TCT |
| R108F | TTT |
| R108W | TGG |
| R108I | ATT |
| R108L | CTT |
| R108N | AAT |
| R108V | GTT |
| A109S | TCG |
| A109R | CGG |
| A109T | ACG |
| A109W | TGG |
| A109I | ATT |
| A109Q | CAG |
| A109N | AAT |
| A109Y | TAT |
| A109G | GGG |
| A109M | ATG |
| A109D | GAT |
| F119L | TTG |
| F119N | AAT |
| F119S | AGT |
| F119C | TGT |
| F119P | CCG |
| F119W | TGG |
| F119K | AAG |
| F119H | CAT |
| F119A | GCG |
| F119V | GTT |
| F119Y | TAT |
| F119E | GAG |
| Q120K | AAG |
| Q120N | AAT |
| Q120A | GCG |
| Q120V | GTG |
| Q120D | GAT |
| Q120R | CGG |
| Q120P | CCT |
| Q120W | TGG |
| Q120Y | TAT |
| Q120C | TGT |
| Q120H | CAT |
| Q120T | ACT |
| Q120M | ATG |
| Q120E | GAG |
| Q120G | GGT |
| L121E | GAG |
| L121Q | CAG |
| L121P | CCT |
| L121R | CGG |
| L121C | TGT |
| L121G | GGG |
| L121K | AAG |
| L121F | TTT |
| L121I | ATT |
| L121S | TCG |
| L121V | GTT |
| L121H | CAT |
| L121T | ACT |
| L121A | GCT |
| L121N | AAT |
| W122R | CGT |
| W122A | GCG |
| W122N | AAT |
| W122P | CCG |
| W122T | ACG |
| W122L | CTT |
| T131R | CGT |
| T131Y | TAT |
| T131M | ATG |
| K132G | GGT |
| K132V | GTG |
| K132L | TTG |
| K132A | GCT |
| K132P | CCG |
| K132F | TTT |
| K132R | CGG |
| K132I | ATT |
| K132H | CAT |
| K132S | TCT |
| K132M | ATG |
| K132D | GAT |
| K132T | ACT |
| K132Y | TAT |
| K132E | GAG |
| V133G | GGG |
| V133E | GAG |
| V133T | ACT |
| V133N | AAT |
| V133A | GCG |
| V133H | CAT |
| V133P | CCG |
| V133K | AAG |
| V133R | CGG |
| V133L | CTT |
| V133W | TGG |
| V133C | TGT |
| V133D | GAT |
| V133M | ATG |
| V133S | AGT |
| S134V | GTT |
| S134H | CAT |
| S134P | CCT |
| S134G | GGG |
| S134N | AAT |
| S134R | CGT |
| S134L | CTG |
| S134Q | CAG |
| S134E | GAG |
| S134Y | TAT |
| S134A | GCG |
| S134K | AAG |
| S134D | GAT |
| S134T | ACG |
| S134C | TGT |
| F144N | AAT |
| F144C | TGT |
| F144G | GGT |
| F144T | ACT |
| F144Q | CAG |
| F144H | CAT |
| F144V | GTG |
| V145A | GCG |
| V145T | ACG |
| V145L | CTG |
| V145P | CCG |
| V145K | AAG |
| V145N | AAT |
| V145D | GAT |
| V145H | CAT |
| V145R | CGG |
| V145Q | CAG |
| V145S | TCT |
| V145G | GGG |
| V145W | TGG |
| V145C | TGT |
| V145E | GAG |
| R146T | ACG |
| R146L | CTG |
| R146N | AAT |
| R146H | CAT |
| R146Q | CAG |
| R146K | AAG |
| R146C | TGT |
| R146S | AGT |
| R146D | GAT |
| R146A | GCT |
| R146Y | TAT |
| R146P | CCT |
| R146V | GTT |
| R146E | GAG |
| R146F | TTT |
| G147R | CGT |
| G147F | TTT |
| G147I | ATT |
| G147L | CTG |
| G147A | GCG |
| G147E | GAG |
| G147H | CAT |
| G147W | TGG |
| G147T | ACG |
| G147C | TGT |
| G147S | TCT |
| G157L | TTG |
| G157N | AAT |
| G157Y | TAT |
| G157S | TCG |
| G157T | ACG |
| G157A | GCT |
| G157Q | CAG |
| G157P | CCG |
| G157V | GTG |
| G157M | ATG |
| P158S | TCT |
| P158Y | TAT |
| P158R | CGG |
| P158L | CTT |
| P158V | GTG |
| P158C | TGT |
| P158A | GCG |
| P158W | TGG |
| P158I | ATT |
| P158F | TTT |
| P158Q | CAG |
| P158T | ACT |
| P158G | GGT |
| P158K | AAG |
| P158N | AAT |
| P158D | GAT |
| G159R | CGG |
| G159S | AGT |
| G159Q | CAG |
| G159P | CCT |
| G159V | GTG |
| G159K | AAG |
| G159A | GCG |
| G159Y | TAT |
| G159E | GAG |
| G159T | ACG |
| G159M | ATG |
| G159I | ATT |
| G159W | TGG |
| G159L | CTG |
| G159C | TGT |
| G160A | GCG |
| G160H | CAT |
| G160N | AAT |
| G160W | TGG |
| G160R | CGG |
| G160P | CCG |
| G160I | ATT |
| P170R | CGG |
| P170I | ATT |
| P170T | ACG |
| P170F | TTT |
| P170Q | CAG |
| P170G | GGG |
| P170S | TCT |
| P170H | CAT |
| P170C | TGT |
| P170M | ATG |
| P170K | AAG |
| P170W | TGG |
| P170D | GAT |
| P170A | GCG |
| G171S | TCT |
| G171M | ATG |
| G171N | AAT |
| G171P | CCT |
| G171R | CGG |
| G171Y | TAT |
| G171A | GCT |
| G171Q | CAG |
| G171H | CAT |
| G171L | CTT |
| G171W | TGG |
| G171C | TGT |
| G171K | AAG |
| G171E | GAG |
| G171D | GAT |
| I172Y | TAT |
| I172T | ACG |
| I172P | CCT |
| I172A | GCG |
| I172L | CTT |
| I172Q | CAG |
| I172E | GAG |
| I172C | TGT |
| I172M | ATG |
| I172D | GAT |
| I172V | GTT |
| I172R | CGT |
| I172G | GGG |
| I172W | TGG |
| I172N | AAT |
| G173C | TGT |
| G173L | CTG |
| G173K | AAG |
| G173W | TGG |
| E182Q | CAG |
| E182W | TGG |
| E182M | ATG |
| E182G | GGT |
| R183P | CCT |
| R183K | AAG |
| R183W | TGG |
| R183E | GAG |
| R183A | GCT |
| R183T | ACG |
| R183L | CTT |
| R183N | AAT |
| R183H | CAT |
| R183V | GTG |
| R183C | TGT |
| R183M | ATG |
| R183I | ATT |
| R183G | GGT |
| R183S | TCT |
| W184G | GGG |
| W184H | CAT |
| W184L | CTG |
| W184E | GAG |
| W184P | CCT |
| W184N | AAT |
| W184A | GCG |
| W184T | ACT |
| W184R | CGG |
| W184Q | CAG |
| W184V | GTG |
| W184S | TCT |
| W184M | ATG |
| W184I | A1T |
| W184F | TTT |
| T185R | CG1 |
| T185Y | TAT |
| T185W | TGG |
| T185H | CAT |
| T185G | GGG |
| T185P | CCT |
| T185S | TCG |
| T185V | GTT |
| T185Q | CAG |
| T185N | AAT |
| T185C | TGT |
| T185L | CTT |
| T185A | GCG |
| T185E | GAG |
| R195S | TCT |
| R195A | GCT |
| R195D | GAT |
| R195P | CCT |
| R195Y | TAT |
| R195E | GAG |
| R195V | GTG |
| V196T | ACG |
| V196D | GAT |
| V196G | GGG |
| V196E | GAG |
| V196A | GCG |
| V196S | AGT |
| V196Q | CAG |
| V196P | CCG |
| V196R | CGT |
| V196H | CAT |
| V196Y | TAT |
| V196I | ATT |
| V196L | CTG |
| V196K | AAG |
| V196M | ATG |
| A197G | GGT |
| A197S | AGT |
| A197L | CTT |
| A197P | CCG |
| A197V | GTG |
| A197Y | TAT |
| A197Q | CAG |
| A197R | CGG |
| A197T | ACT |
| A197I | ATT |
| A197H | CAT |
| A197E | GAG |
| A197W | TGG |
| A197N | AAT |
| A197C | TGT |
| A198T | ACG |
| A198K | AAG |
| A198S | TCG |
| A198H | CAT |
| A198G | GGT |
| A198E | GAG |
| A198P | CCG |
| A198L | TTG |
| A198R | CGT |
| A198V | GTT |
| A198M | ATG |
| S208K | AAG |
| S208N | AAT |
| S208F | TTT |
| S208Q | CAG |
| 5208W | TGG |
| S208T | ACG |
| S208E | GAG |
| S208C | TGT |
| S208R | CGT |
| S208L | CTT |
| H209T | ACG |
| H209Y | TAT |
| H209R | CGG |
| H209Q | CAG |
| H209A | GCT |
| H209G | GGG |
| H209N | AAT |
| H209P | CCT |
| H209W | TGG |
| H209V | GTT |
| H209D | GAT |
| H209S | AGT |
| H209F | TTT |
| H209L | CTG |
| H209C | TGT |
| S210C | TGT |
| S210G | GGT |
| S210I | ATT |
| S210R | CGT |
| S210L | CTG |
| S210V | GTG |
| S210H | CAT |
| S210N | AAT |
| S210F | TTT |
| S210P | CCG |
| S210W | TGG |
| S210Q | CAG |
| S210T | ACG |
| S210K | AAG |
| S210A | GCG |
| T211P | CCG |
| T211R | CGT |
| T211K | AAG |
| T211G | GGG |
| T211M | ATG |
| T211N | AAT |
| T211V | GTG |
| T211H | CAT |
| S220N | AAT |
| Y221W | TGG |
| Y221K | AAG |
| Y221Q | CAG |
| Y221C | TGT |
| Y221N | AAT |
| Y221P | CCT |
| Y221V | GTT |
| Y221A | GCG |
| Y221G | GGG |
| Y221R | CGG |
| Y221S | TCG |
| Y221M | ATG |
| Y221T | ACG |
| Y221L | CTT |
| Y221E | GAG |
| T222L | TTG |
| T222Y | TAT |
| T222R | CGT |
| T222V | GTT |
| T222P | CCT |
| T222S | AGT |
| T222A | GCT |
| T222H | CAT |
| T222G | GGG |
| T222M | ATG |
| T222F | TTT |
| T222C | TGT |
| T222I | ATT |
| T222N | AAT |
| T222W | TGG |
| T222D | GAT |
| F223L | TTG |
| F223T | ACG |
| F223C | TGT |
| F223R | CGT |
| F223N | AAT |
| F223P | CCT |
| F223E | GAG |
| F223G | GGG |
| F223Q | CAG |
| F223A | GCG |
| F223S | TCT |
| F223Y | TAT |
| F223H | CAT |
| F223K | AAG |
| F223M | ATG |
| S224G | GGG |
| D233V | GTG |
| D233M | ATG |
| D233L | CTG |
| D233K | AAG |
| D233I | ATT |
| I234A | GCT |
| I234T | ACG |
| I234V | GTT |
| I234W | TGG |
| I234E | GAG |
| I234G | GGT |
| I234L | CTT |
| I234H | CAT |
| I234M | ATG |
| I234N | AAT |
| I234Y | TAT |
| I234P | CCT |
| I234D | GAT |
| I234Q | CAG |
| I234C | TGT |
| D235H | CAT |
| D235G | GGG |
| D235A | GCG |
| D235P | CCG |
| D235L | CTT |
| D235V | GTG |
| D235E | GAG |
| D235R | CGT |
| D235Q | CAG |
| D235T | ACG |
| D235C | TGT |
| D235S | TCG |
| D235N | AAT |
| D235Y | TAT |
| D235I | ATT |
| G236M | ATG |
| G236R | CGG |
| G236D | GAT |
| G236S | TCT |
| G236T | ACT |
| G236C | TGT |
| G236K | AAG |
| G236E | GAG |
| G236P | CCG |
| G236I | ATT |
| G236Y | TAT |
| G236L | CTG |
| G236V | GTT |
| N246V | GTT |
| N246Q | CAG |
| N246Y | TAT |
| N246C | TGT |
| N246I | ATT |
| N246L | TTG |
| N246S | TCT |
| N246T | ACT |
| N246K | AAG |
| N246D | GAT |
| P247A | GCG |
| P247D | GAT |
| P247E | GAG |
| P247F | TTT |
| P247G | GGG |
| P247H | CAT |
| P247I | ATT |
| P247K | AAG |
| P247L | CTG |
| P247N | AAT |
| P247Q | CAG |
| P247R | CGT |
| P247S | TCG |
| P247T | ACG |
| P247V | GTT |
| V248W | TGG |
| V248L | CTG |
| V248Q | CAG |
| V248M | ATG |
| V248Y | TAT |
| V248G | GGG |
| V248C | TGT |
| V248R | CGG |
| V248A | GCG |
| V248H | CAT |
| V248I | ATT |
| V248T | ACT |
| V248K | AAG |
| V248S | TCG |
| V248F | TTT |
| V248E | GAG |
| Q249T | ACT |
| Q249W | TGG |
| Q249R | CGG |
| Q249E | GAG |
| Q249A | GCT |
| Q249P | CCG |
| Q249C | TGT |
| T84L | TTG |
| T84D | GAT |
| T84R | CGG |
| T84I | ATT |
| T84S | TCT |
| T84G | GGT |
| T84Q | CAG |
| T84P | CCT |
| T84A | GCG |
| T84C | TGT |
| T84Y | TAT |
| T84F | TTT |
| E85L | CTG |
| E85Q | CAG |
| E85P | CCT |
| E85T | ACT |
| E85K | AAG |
| E85M | ATG |
| E85G | GGT |
| E85R | CGT |
| E85S | TCT |
| E85C | TGT |
| E85Y | TAT |
| E85A | GCG |
| E85N | AAT |
| E85V | GTG |
| E85F | TTT |
| G86L | CTT |
| G86P | CCG |
| G86I | ATT |
| G86T | ACT |
| G86H | CAT |
| G86D | GAT |
| G86N | AAT |
| G86S | AGT |
| G86K | AAG |
| G86W | TGG |
| G86Y | TAT |
| G86V | GTT |
| G86C | TGT |
| G86M | ATG |
| G86F | TTT |
| N87M | ATG |
| N87L | CTG |
| N87P | CCG |
| N87V | GTT |
| N87R | CGT |
| N87F | TTT |
| Y97R | CGT |
| Y97V | GTG |
| Y97A | GCT |
| Y97P | CCT |
| Y97L | CTT |
| Y97T | ACG |
| Y97K | AAG |
| Y97W | TGG |
| Y97H | CAT |
| Y97S | TCG |
| Y97E | GAG |
| Y97D | GAT |
| Y97N | AAT |
| Y97G | GGT |
| Y97Q | CAG |
| R98H | CAT |
| R98K | AAG |
| R98C | TGT |
| R98L | CTG |
| R98M | ATG |
| R98F | TTT |
| R98W | TGG |
| R98Y | TAT |
| R98P | CCT |
| R98E | GAG |
| R98A | GCG |
| R98G | GGG |
| R98V | GTT |
| R98S | TCG |
| R98D | GAT |
| I99C | TGT |
| I99E | GAG |
| I99G | GGG |
| I99H | CAT |
| I99N | AAT |
| I99P | CCT |
| I99T | ACG |
| I99V | GTT |
| I99A | GCG |
| I99F | TTT |
| I99L | CTG |
| I99R | CGT |
| I99S | TCG |
| I99Q | CAG |
| I99W | TGG |
| I99Y | TAT |
| E100V | GTT |
| E100P | CCG |
| A109V | GTT |
| A109E | GAG |
| A109L | CTT |
| A109H | CAT |
| D110P | CCT |
| D110F | TTT |
| D110Q | CAG |
| D110R | CGG |
| D110M | ATG |
| D110H | CAT |
| D110I | ATT |
| D110L | CTT |
| D110V | GTG |
| D110T | ACG |
| D110S | TCG |
| D110Y | TAT |
| D110G | GGT |
| D110C | TGT |
| D110A | GCG |
| V111E | GAG |
| V111A | GCT |
| V111S | TCT |
| V111W | TGG |
| V111G | GGT |
| V111Y | TAT |
| V111P | CCG |
| V111L | CTG |
| V111D | GAT |
| V111K | AAG |
| V111T | ACT |
| V111Q | CAG |
| V111I | ATT |
| V111C | TGT |
| V111R | CGT |
| D112A | GCG |
| D112M | ATG |
| D112V | GTT |
| D112R | CGG |
| D112K | AAG |
| D112P | CCT |
| D112Q | CAG |
| D112F | TTT |
| D112G | GGG |
| D112C | TGT |
| D112W | TGG |
| D112T | ACT |
| D112H | CAT |
| D112S | TCT |
| W122G | GGG |
| W122S | TCG |
| W122V | GTT |
| W122H | CAT |
| W122F | TTT |
| W122Y | TAT |
| W122K | AAG |
| W122Q | CAG |
| W122E | GAG |
| S123D | GAT |
| S123L | TTG |
| S123A | GCT |
| S123C | TGT |
| S123I | ATT |
| S123K | AAG |
| S123N | AAT |
| S123F | TTT |
| S123Y | TAT |
| S123M | ATG |
| S123H | CAT |
| S123R | CGG |
| S123W | TGG |
| S123T | ACG |
| S123P | CCT |
| S123G | GGG |
| S123Q | CAG |
| S123V | GTT |
| N124G | GGT |
| N124C | TGT |
| N124V | GTG |
| N124L | CTT |
| N124T | ACG |
| N124R | CGT |
| N124M | ATG |
| N124S | TCG |
| N124P | CCT |
| N124A | GCG |
| N124K | AAG |
| N124F | TTT |
| N124W | TGG |
| N124I | ATT |
| N124D | GAT |
| V125G | GGG |
| V125Q | CAG |
| V125S | TCG |
| V125P | CCG |
| V125M | ATG |
| V125Y | TAT |
| E135V | GTT |
| E135M | ATG |
| E135S | TCG |
| E135D | GAT |
| E135T | ACG |
| E135L | CTG |
| E135A | GCG |
| E135W | TGG |
| E135F | TTT |
| E135P | CCG |
| E135R | CGG |
| E135N | AAT |
| E135H | CAT |
| E135Q | CAG |
| E135I | ATT |
| G136V | GTG |
| G136W | TGG |
| G136D | GAT |
| G136M | ATG |
| G136N | AAT |
| G136A | GCG |
| G136L | TTG |
| G136C | TGT |
| G136P | CCG |
| G136T | ACG |
| G136R | CGT |
| G136S | TCG |
| G136I | ATT |
| G136H | CAT |
| G136E | GAG |
| Q137A | GCT |
| Q137R | CGG |
| Q137G | GGG |
| Q137K | AAG |
| Q137H | CAT |
| Q137P | CCT |
| Q137S | TCG |
| Q137L | CTG |
| Q137W | TGG |
| Q137F | TTT |
| Q137T | ACG |
| Q137C | TGT |
| Q137Y | TAT |
| Q137N | AAT |
| Q137E | GAG |
| A138V | GTT |
| A138L | CTT |
| A138P | CCG |
| G147V | GTT |
| G147Q | CAG |
| G147M | ATG |
| G147P | CCT |
| D148R | CGG |
| D148I | ATT |
| D148T | ACG |
| D148G | GGT |
| D148L | CTG |
| D148V | GTT |
| D148A | GCG |
| D148W | TGG |
| D148P | CCG |
| D148S | TCG |
| D148K | AAG |
| D148E | GAG |
| D148M | ATG |
| D148N | AAT |
| D148C | TGT |
| H149W | TGG |
| H149A | GCG |
| H149L | TTG |
| H149C | TGT |
| H149Q | CAG |
| H149T | ACT |
| H149Y | TAT |
| H149P | CCG |
| H149V | GTT |
| H149R | CGG |
| H149G | GGT |
| H149E | GAG |
| H149S | AGT |
| H149I | ATT |
| H149N | AAT |
| R150S | TCG |
| R150E | GAG |
| R150G | GGG |
| R150M | ATG |
| R150P | CCG |
| R150T | ACG |
| R150W | TGG |
| R150A | GCG |
| R150N | AAT |
| R150K | AAG |
| R150L | TTG |
| R150V | GTT |
| R150D | GAT |
| R150I | ATT |
| G160M | ATG |
| G160C | TGT |
| G160Q | CAG |
| G160V | GTT |
| G160S | AGT |
| G160E | GAG |
| G160L | CTT |
| G160T | ACG |
| N161S | AGT |
| N161C | TGT |
| N161L | TTG |
| N161R | CGT |
| N161G | GGT |
| N161W | TGG |
| N161Y | TAT |
| N161E | GAG |
| N161P | CCT |
| N161T | ACG |
| N161H | CAT |
| N161I | ATT |
| N161V | GTG |
| N161F | TTT |
| N161Q | CAG |
| L162A | GCT |
| L162G | GGG |
| L162C | TGT |
| L162P | CCG |
| L162R | CGG |
| L162I | ATT |
| L162S | TCT |
| L162D | GAT |
| L162M | ATG |
| L162E | GAG |
| L162T | ACT |
| L162Y | TAT |
| L162F | TTT |
| L162W | TGG |
| L162Q | CAG |
| A163R | CGT |
| A163G | GGG |
| A163Y | TAT |
| A163P | CCT |
| A163S | AGT |
| A163L | CTT |
| A163C | TGT |
| A163K | AAG |
| A163V | GTG |
| A163F | TTT |
| G173S | AGT |
| G173A | GCG |
| G173R | AGG |
| G173N | AAT |
| G173T | ACG |
| G173D | GAT |
| G173V | GTT |
| G173F | TTT |
| G173M | ATG |
| G173Y | TAT |
| G173P | CCG |
| G174R | CGT |
| G174A | GCG |
| G174E | GAG |
| G174F | TTT |
| G174H | CAT |
| G174T | ACT |
| G174D | GAT |
| G174S | AGT |
| G174P | CCG |
| G174W | TGG |
| G174V | GTT |
| G174N | AAT |
| G174Y | TAT |
| G174M | ATG |
| G174L | CTT |
| D175I | ATT |
| D175T | ACG |
| D175N | AAT |
| D175V | GTT |
| D175S | TCG |
| D175R | CGG |
| D175G | GGG |
| D175A | GCG |
| D175F | TTT |
| D175C | TGT |
| D175Q | CAG |
| D175Y | TAT |
| D175L | CTG |
| D175H | CAT |
| D175P | CCG |
| D175E | GAG |
| A176F | TTT |
| A176Q | CAG |
| A176V | GTG |
| A176E | GAG |
| A176T | ACT |
| A176C | TGT |
| T185D | GAT |
| N186G | GGG |
| N186A | GCT |
| N186T | ACT |
| N186R | CGT |
| N186L | TTG |
| N186P | CCG |
| N186S | AGT |
| N186V | GTG |
| N186Q | CAG |
| N186H | CAT |
| N186C | TGT |
| N186E | GAG |
| N186F | TTT |
| N186Y | TAT |
| N186D | GAT |
| N187R | CGG |
| N187M | ATG |
| N187S | TCT |
| N187T | ACG |
| N187L | CTG |
| N187W | TGG |
| N187F | TTT |
| N187K | AAG |
| N187I | ATT |
| N187A | GCT |
| N187P | CCG |
| N187D | GAT |
| N187G | GGG |
| N187C | TGT |
| N187H | CAT |
| F188P | CCG |
| F188I | ATT |
| F188N | AAT |
| F188S | AGT |
| F188Q | CAG |
| F188K | AAG |
| F188G | GGG |
| F188W | TGG |
| F188E | GAG |
| F188H | CAT |
| F188D | GAT |
| F188A | GCG |
| F188L | CTT |
| F188R | CGT |
| F188V | GTT |
| R189L | TTG |
| R189G | GGG |
| A198F | TTT |
| A198W | TGG |
| A198Y | TAT |
| A198D | GAT |
| H199I | ATT |
| H199P | CCG |
| H199G | GGT |
| H199N | AAT |
| H199S | TCG |
| H199L | TTG |
| H199M | ATG |
| H199A | GCG |
| H199C | TGT |
| H199K | AAG |
| H199R | CGT |
| H199V | GTG |
| H199W | TGG |
| H199T | ACT |
| H199E | GAG |
| E200P | CCG |
| E200G | GGG |
| E200A | GCT |
| E200T | ACG |
| E200I | ATT |
| E200W | TGG |
| E200R | CGG |
| E200F | TTT |
| E200M | ATG |
| E200D | GAT |
| E200V | GTG |
| E200C | TGT |
| E200S | TCT |
| E200Y | TAT |
| E200N | AAT |
| L201A | GCG |
| L201R | CGG |
| L201E | GAG |
| L201P | CCT |
| L201G | GGT |
| L201V | GTT |
| L201T | ACG |
| L201I | ATT |
| L201S | TCT |
| L201W | TGG |
| L201Q | CAG |
| L201D | GAT |
| L201M | ATG |
| L201K | AAG |
| T211Q | CAG |
| T211S | TCG |
| T211A | GCG |
| T211F | TTT |
| T211D | GAT |
| T211W | TGG |
| T211L | CTG |
| D212E | GAG |
| D212A | GCG |
| D212K | AAG |
| D212R | CGG |
| D212T | ACG |
| D212N | AAT |
| D212G | GGG |
| D212S | TCT |
| D212P | CCG |
| D212Q | CAG |
| D212V | GTT |
| D212L | TTG |
| D212F | TTT |
| D212H | CAT |
| D212Y | TAT |
| I213Q | CAG |
| I213T | ACT |
| I213C | TGT |
| I213P | CCT |
| I213H | CAT |
| I213A | GCG |
| I213V | GTT |
| I213G | GGG |
| I213N | AAT |
| I213L | CTT |
| I213S | AGT |
| I213M | ATG |
| I213R | CGG |
| I213K | AAG |
| I213F | TTT |
| I213D | GAT |
| I213E | GAG |
| G214L | TTG |
| G214Q | CAG |
| G214S | TCT |
| G214T | ACT |
| G214V | GTG |
| G214I | ATT |
| G214R | CGT |
| G214P | CCG |
| G214E | GAG |
| S224T | ACG |
| S224Q | CAG |
| S224R | CGG |
| S224P | CCG |
| S224I | ATT |
| S224V | GTT |
| S224L | TTG |
| S224C | TGT |
| S224K | AAG |
| S224D | GAT |
| S224H | CAT |
| S224M | ATG |
| S224A | GCT |
| S224W | TGG |
| G225D | GAT |
| G225R | CGT |
| G225Q | CAG |
| G225M | ATG |
| G225P | CCT |
| G225W | TGG |
| G225S | TCT |
| G225E | GAG |
| G225V | GTT |
| G225T | ACG |
| G225K | AAG |
| G225N | AAT |
| G225C | TGT |
| G225H | CAT |
| G225A | GCG |
| D226S | TCT |
| D226W | TGG |
| D226R | CGG |
| D226A | GCT |
| D226N | AAT |
| D226T | ACT |
| D226E | GAG |
| D226L | CTT |
| D226P | CCT |
| D226H | CAT |
| D226G | GGT |
| D226I | ATT |
| D226M | ATG |
| D226V | GTG |
| D226C | TGT |
| V227A | GCT |
| V227C | TGT |
| V227D | GAT |
| V227E | GAG |
| G236N | AAT |
| G236F | TTT |
| I237S | TCG |
| I237L | CTG |
| I237R | CGT |
| I237Q | CAG |
| I237K | AAG |
| I237D | GAT |
| I237A | GCG |
| I237T | ACG |
| I237E | GAG |
| I237C | TGT |
| I237G | GGG |
| I237P | CCT |
| I237Y | TAT |
| I237W | TGG |
| I237N | AAT |
| Q238G | GGG |
| Q238H | CAT |
| Q238S | TCG |
| Q238Y | TAT |
| Q238F | TTT |
| Q238E | GAG |
| Q238L | TTG |
| Q238W | TGG |
| Q238P | CCG |
| Q238R | AGG |
| Q238C | TGT |
| Q238N | AAT |
| Q238I | ATT |
| Q238T | ACG |
| Q238K | AAG |
| A239S | TCT |
| A239Q | CAG |
| A239T | ACG |
| A239P | CCT |
| A239V | GTG |
| A239L | CTG |
| A239Y | TAT |
| A239I | ATT |
| A239C | TGT |
| A239G | GGG |
| A239W | TGG |
| A239F | TTT |
| A239K | AAG |
| A239H | CAT |
| A239R | CGT |
| A239D | GAT |
| Q249G | GGT |
| Q249N | AAT |
| Q249K | AAG |
| Q249I | ATT |
| Q249Y | TAT |
| Q249V | GTG |
| Q249L | TTG |
| Q249H | CAT |
| P250L | CTG |
| P250S | TCG |
| P250R | CGG |
| P250Y | TAT |
| P250M | ATG |
| P250F | TTT |
| P250A | GCT |
| P250K | AAG |
| P250G | GGT |
| P250N | AAT |
| P250T | ACT |
| P250W | TGG |
| P250D | GAT |
| P250V | GTG |
| P250Q | CAG |
| I251A | GCG |
| I251Q | CAG |
| I251G | GGG |
| I251L | CTG |
| I251K | AAG |
| I251R | CGT |
| I251E | GAG |
| I251D | GAT |
| I251T | ACG |
| I251C | TGT |
| I251Y | TAT |
| I251P | CCT |
| I251S | TCT |
| I251W | TGG |
| I251V | GTT |
| G252F | TTT |
| G252W | TGG |
| G252A | GCG |
| G252R | CGG |
| G252L | CTT |
| G252E | GAG |
| G252D | GAT |
| G252K | AAG |
| G252S | TCG |
| G252T | ACG |
| N87S | AGT |
| N87I | ATT |
| N87C | TGT |
| N87A | GCG |
| N87G | GGT |
| N87Y | TAT |
| N87E | GAG |
| N87H | CAT |
| N87Q | CAG |
| P88C | TGT |
| P88K | AAG |
| P88W | TGG |
| P88G | GGG |
| P88L | CTG |
| P88Q | CAG |
| P88A | GCG |
| P88T | ACG |
| P88Y | TAT |
| P88R | CGG |
| P88H | CAT |
| P88I | ATT |
| P88V | GTG |
| P88E | GAG |
| P88D | GAT |
| R89V | GTG |
| R89W | TGG |
| R89M | ATG |
| R89A | GCG |
| R89T | ACG |
| R89G | GGG |
| R89S | TCT |
| R89K | AAG |
| R89F | TTT |
| R89Y | TAT |
| R89N | AAT |
| R89H | CAT |
| R89L | TTG |
| R89E | GAG |
| R89P | CCT |
| W90L | TTG |
| W90G | GGG |
| W90P | CCG |
| W90T | ACT |
| W90S | TCG |
| W90V | GTG |
| W90I | ATT |
| W90A | GCT |
| W90F | TTT |
| E100L | CTG |
| E100H | CAT |
| E100D | GAT |
| E100M | ATG |
| E100G | GGT |
| E100W | TGG |
| E100Y | TAT |
| E100R | CGT |
| E100S | TCT |
| E100T | ACG |
| E100F | TTT |
| E100I | ATT |
| E100N | AAT |
| N101M | ATG |
| N101F | TTT |
| N101L | TTG |
| N101V | GTG |
| N101H | CAT |
| N101R | CGG |
| N101C | TGT |
| N101T | ACT |
| N101P | CCT |
| N101W | TGG |
| N101K | AAG |
| N101S | TCG |
| N101D | GAT |
| N101A | GCG |
| N101Y | TAT |
| Y102R | CGT |
| Y102K | AAG |
| Y102V | GTG |
| Y102M | ATG |
| Y102P | CCG |
| Y102N | AAT |
| Y102G | GGG |
| Y102L | CTG |
| Y102D | GAT |
| Y102S | TCG |
| Y102F | TTT |
| Y102A | GCT |
| Y102E | GAG |
| Y102Q | CAG |
| Y102C | TGT |
| T103E | GAG |
| T103D | GAT |
| T103S | AGT |
| T103L | CTG |
| T103V | GTT |
| D112I | ATT |
| D112Y | TAT |
| D112L | TTG |
| H113T | ACT |
| H113L | CTG |
| H113M | ATG |
| H113S | TCG |
| H113N | AAT |
| H113R | AGG |
| H113A | GCT |
| H113E | GAG |
| H113V | GTG |
| H113Y | TAT |
| H113F | TTT |
| H113D | GAT |
| H113W | TGG |
| H113G | GGG |
| H113P | CCG |
| A114E | GAG |
| A114S | TCG |
| A114I | ATT |
| A114P | CCT |
| A114N | AAT |
| A114L | C1T |
| A114T | ACT |
| A114F | TTT |
| A114V | GTT |
| A114G | GGT |
| A114C | TGT |
| A114M | ATG |
| A114R | AGG |
| A114W | TGG |
| A114Q | CAG |
| I115F | TTT |
| I115T | ACT |
| I115H | CAT |
| I115G | GGT |
| I115K | AAG |
| I115E | GAG |
| I115S | AGT |
| I115P | CCT |
| I115C | TGT |
| I115L | CTT |
| I115Q | CAG |
| I115R | CGG |
| I115W | TGG |
| I115V | GTT |
| I115D | GAT |
| V125T | ACG |
| V125A | GCT |
| V125C | TGT |
| V125D | GAT |
| V125W | TGG |
| V125R | CGG |
| V125E | GAA |
| V125F | TTT |
| V125H | CAT |
| T126K | AAG |
| T126V | GTG |
| T126G | GGG |
| T126R | CGG |
| T126L | TTG |
| T126H | CAT |
| T126M | ATG |
| T126P | CCG |
| T126A | GCG |
| T126N | AAT |
| T126E | GAG |
| T126F | TTT |
| T126W | TGG |
| T126Q | CAG |
| T126S | AGT |
| P127C | TGT |
| P127F | TTT |
| P127T | ACG |
| P127E | GAG |
| P127W | TGG |
| P127A | GCT |
| P127S | AGT |
| P127H | CAT |
| P127Q | CAG |
| P127K | AAG |
| P127R | CGG |
| P127I | ATT |
| P127V | GTG |
| P127L | CTG |
| P127M | ATG |
| L128F | TTT |
| L128M | ATG |
| L128T | ACT |
| L128R | CGT |
| L128S | TCG |
| L128G | GGT |
| L128I | ATT |
| L128Q | CAG |
| L128P | CCT |
| A138C | TGT |
| A138T | ACG |
| A138S | TCT |
| A138R | CGT |
| A138G | GGG |
| A138E | GAG |
| A138H | CAT |
| A138M | ATG |
| A138Q | CAG |
| A138I | ATT |
| A138D | GAT |
| A138W | TGG |
| D139R | CGT |
| D139V | GTT |
| D139M | ATG |
| D139C | TGT |
| D139P | CCT |
| D139S | TCT |
| D139L | CTT |
| D139I | ATT |
| D139H | CAT |
| D139A | GCG |
| D139G | GGG |
| D139F | TTT |
| D139N | AAT |
| D139W | TGG |
| D139Y | TAT |
| D139E | GAG |
| I140D | GAT |
| I140K | AAG |
| I140A | GCT |
| I140G | GGG |
| I140C | TGT |
| I140Y | TAT |
| I140V | GTT |
| I140W | TGG |
| I140F | TTT |
| I140H | CAT |
| I140L | CTG |
| I140R | CGG |
| I140E | GAG |
| I140M | ATG |
| I140T | ACT |
| M141E | GAG |
| M141I | ATT |
| M141R | CGG |
| M141T | ACG |
| M141P | CCG |
| R150H | CAT |
| D151R | CGT |
| D151F | TTT |
| D151P | CCG |
| D151W | TGG |
| D151Q | CAG |
| D151L | CTT |
| D151S | TCG |
| D151G | GGT |
| D151A | GCT |
| D151N | AAT |
| D151K | AAG |
| D151Y | TAT |
| D151V | GTT |
| D151T | ACT |
| D151M | ATG |
| N152G | GGG |
| N152C | TGT |
| N152F | TTT |
| N152L | TTG |
| N152P | CCG |
| N152R | CGG |
| N152H | CAT |
| N152T | ACG |
| N152Y | TAT |
| N152K | AAG |
| N152D | GAT |
| N152W | TGG |
| N152I | ATT |
| N152A | GCG |
| N152S | TCT |
| S153I | ATT |
| S153R | CGG |
| S153K | AAG |
| S153C | TGT |
| S153G | GGG |
| S153H | CAT |
| S153L | CTT |
| S153V | GTT |
| S153T | ACG |
| S153P | CCT |
| S153A | GCG |
| S153F | TTT |
| S153D | GAT |
| S153Q | CAG |
| S153Y | TAT |
| P154V | GTT |
| P154W | TGG |
| A163E | GAG |
| A163T | ACG |
| A163Q | CAG |
| A163I | ATT |
| A163N | AAT |
| H164L | CTT |
| H164M | ATG |
| H164K | AAG |
| H164P | CCG |
| H164C | TGT |
| H164R | CGT |
| H164A | GCG |
| H164V | GTG |
| H164S | TCG |
| H164N | AAT |
| H164G | GGG |
| H164F | TTT |
| H164Y | TAT |
| H164Q | CAG |
| H164E | GAG |
| A165W | TGG |
| A165V | GTT |
| A165G | GGG |
| A165K | AAG |
| A165L | TTG |
| A165P | CCT |
| A165Q | CAG |
| A165D | GAT |
| A165H | CAT |
| A165F | TTT |
| A165S | AGT |
| A165T | ACT |
| A165R | CGG |
| A165N | AAT |
| A165M | ATG |
| F166G | GGG |
| F166S | TCG |
| F166L | CTT |
| F166V | GTG |
| F166P | CCT |
| F166N | AAT |
| F166R | CGT |
| F166A | GCG |
| F166K | AAG |
| F166H | CAT |
| F166W | TGG |
| F166I | ATT |
| F166M | ATG |
| A176L | CTG |
| A176P | CCT |
| A176N | AAT |
| A176G | GGT |
| A176S | TCT |
| A176R | CGT |
| A176K | AAG |
| A176D | GAT |
| A176W | TGG |
| H177T | ACG |
| H177P | CCG |
| H177Q | CAG |
| H177A | GCG |
| H177S | TCG |
| H177G | GGG |
| H177W | TGG |
| H177L | CTG |
| H177V | GTT |
| H177I | ATT |
| H177R | CGG |
| H177N | AAT |
| H177Y | TAT |
| H177C | TGT |
| H177D | GAT |
| F178G | GGT |
| F178C | TGT |
| F178W | TGG |
| F178R | CGG |
| F178K | AAG |
| F178S | AGT |
| F178H | CAT |
| F178P | CCT |
| F178V | GTT |
| F178A | GCT |
| F178Q | CAG |
| F178Y | TAT |
| F178I | ATT |
| F178T | ACT |
| F178L | CTG |
| F178E | GAG |
| D179P | CCT |
| D179L | TTG |
| D179E | GAG |
| D179G | GGG |
| D179S | AGT |
| D179A | GCT |
| D179K | AAG |
| D179T | ACT |
| R189K | AAG |
| R189P | CCG |
| R189E | GAG |
| R189V | GTT |
| R189D | GAT |
| R189Y | TAT |
| R189C | TGT |
| R189A | GCT |
| R189H | CAT |
| R189W | TGG |
| R189N | AAT |
| R189T | ACT |
| R189Q | CAG |
| E190A | GCG |
| E190H | CAT |
| E190V | GTG |
| E190P | CCG |
| E190C | TGT |
| E190G | GGT |
| E190R | CGG |
| E190I | ATT |
| E190S | TCG |
| E190T | ACT |
| E190M | ATG |
| E190L | TTG |
| F190K | AAG |
| E190Y | TAT |
| E190D | GAT |
| Y191T | ACT |
| Y191H | CAT |
| Y191G | GGG |
| Y191L | TTG |
| Y191P | CCT |
| Y191Q | CAG |
| Y171K | AAG |
| Y191D | GAT |
| Y191A | GCG |
| Y191W | TGG |
| Y191S | TCT |
| Y191V | GTT |
| Y191E | GAG |
| Y191R | CGT |
| Y191C | TGT |
| N192R | CGG |
| N192L | CTG |
| N192Q | CAG |
| N192P | CCT |
| N192H | CAT |
| L201N | AAT |
| G202T | ACG |
| G202Y | TAT |
| G202E | GAG |
| G202V | GTG |
| G202S | TCT |
| G202L | CTG |
| G202I | ATT |
| G202M | ATG |
| G202H | CAT |
| G202C | TGT |
| G202R | CGT |
| G202P | CCT |
| G202A | GCT |
| G202K | AAG |
| G202D | GAT |
| H203Y | TAT |
| H203E | GAG |
| H203R | CGG |
| H203Q | CAG |
| H203P | CCG |
| H203G | GGG |
| H203T | ACT |
| H203D | GAT |
| H203L | TTG |
| H203N | AAT |
| H203A | GCT |
| H203S | TCT |
| H203V | GTT |
| H203I | ATT |
| H203C | TGT |
| S204R | CGG |
| S204N | AAT |
| S204A | GCG |
| S204T | ACT |
| S204Y | TAT |
| S204V | GTG |
| S204L | CTT |
| S204H | CAT |
| S204D | GAT |
| S204Q | CAG |
| S204G | GGG |
| S204W | TGG |
| S204I | ATT |
| S204K | AAG |
| S204P | CCT |
| L205T | ACG |
| L205D | GAT |
| G214A | GCT |
| G214D | GAT |
| G214F | TTT |
| G214Y | TAT |
| G214M | ATG |
| G214C | TGT |
| A215L | CTG |
| A215Q | CAG |
| A215M | ATG |
| A215G | GGT |
| A215W | TGG |
| A215S | AGT |
| A215T | ACG |
| A215V | GTT |
| A215N | AAT |
| A215P | CCG |
| A215H | CAT |
| A215K | AAG |
| A215I | ATT |
| A215R | CGT |
| A215C | TGT |
| A215D | GAT |
| L216A | GCT |
| L216C | TGT |
| L216D | GAT |
| L216E | GAG |
| L216G | GGG |
| L216I | ATT |
| L216K | AAG |
| L216M | ATG |
| L216P | CCT |
| L216Q | CAG |
| L216R | CGG |
| L216S | TCT |
| L216T | ACT |
| L216V | GTG |
| L216W | TGG |
| M217P | CCT |
| M217Y | TAT |
| M217T | ACG |
| M217C | TGT |
| M217S | AGT |
| M217L | CTG |
| M217N | AAT |
| M217R | CGG |
| M217Q | CAG |
| M217K | AAG |
| M217G | GGG |
| V227K | AAG |
| V227L | CTG |
| V227P | CCT |
| V227S | TCT |
| V227T | ACT |
| V227W | TGG |
| V227Y | TAT |
| V227G | GGG |
| V227H | CAT |
| V227Q | CAG |
| V227R | CGT |
| Q228A | GCT |
| Q228D | GAT |
| Q228E | GAG |
| Q228G | GGT |
| Q228H | CAT |
| Q228K | AAG |
| Q228L | CTG |
| Q228M | ATG |
| Q228N | AAT |
| Q228P | CCG |
| Q228R | CGG |
| Q228S | TCT |
| Q228T | ACG |
| Q228W | TGG |
| Q228Y | TAT |
| L229R | CGG |
| L229A | GCG |
| L229T | ACG |
| L229Q | CAG |
| L229P | CCT |
| L229E | GAG |
| L229W | TGG |
| L229M | ATG |
| L229I | ATT |
| L229G | GGT |
| L229C | TGT |
| L229Y | TAT |
| L229D | GAT |
| L229H | CAT |
| L229V | GTG |
| A230L | TTG |
| A230G | GGT |
| A230W | TGG |
| A230P | CCG |
| A230D | GAT |
| A230R | CGT |
| A230I | ATT |
| I240G | GGG |
| I240Q | CAG |
| I240P | CCG |
| I240R | CGG |
| I240S | TCG |
| I240K | AAG |
| I240V | GTG |
| I240D | GAT |
| I240A | GCG |
| I240C | TGT |
| I240L | CTT |
| I240F | TTT |
| I240Y | TAT |
| I240M | ATG |
| I240T | ACG |
| Y241V | GTT |
| Y241A | GCT |
| Y241G | GGG |
| Y241H | CAT |
| Y241R | CGG |
| Y241P | CCG |
| Y241Q | CAG |
| Y241L | TTG |
| Y241T | ACG |
| Y241S | AGT |
| Y241W | TGG |
| Y241N | AAT |
| Y241M | ATG |
| Y241I | ATT |
| Y241D | GAT |
| G242A | GCG |
| G242F | TTT |
| G242L | CTT |
| G242N | AAT |
| G242P | CCT |
| G242W | TGG |
| G242T | ACG |
| G242R | CGT |
| G242V | GTT |
| G242S | TCG |
| G242I | ATT |
| G242Y | TAT |
| G242H | CAT |
| G242E | GAG |
| G242K | AAG |
| R243P | CCG |
| R243K | AAG |
| R243T | ACG |
| G252P | CCT |
| G252H | CAT |
| G252C | TGT |
| G252V | GTT |
| G252I | ATT |
| P253C | TGT |
| P253G | GGT |
| P253Q | CAG |
| P253I | ATT |
| P253L | CTG |
| P253R | CGG |
| P253A | GCT |
| P253E | GAG |
| P253Y | TAT |
| P253W | TGG |
| P253M | ATG |
| P253V | GTG |
| P253T | ACT |
| P253K | AAG |
| P253N | AAT |
| Q254R | CGT |
| Q254G | GGG |
| Q254W | TGG |
| Q254T | ACT |
| Q254A | GCT |
| Q254F | TTT |
| Q254D | GAT |
| Q254P | CCG |
| Q254L | CTG |
| Q254C | TGT |
| Q254Y | TAT |
| Q254I | ATT |
| Q254E | GAG |
| Q254V | GTG |
| Q254S | TCT |
| T255I | ATT |
| T255Q | CAG |
| T255P | CCG |
| T255R | CGT |
| T255C | TGT |
| T255N | AAT |
| T255S | AGT |
| T255V | GTG |
| T255E | GAG |
| T255G | GGG |
| T255K | AAG |
| T255A | GCT |
| T255F | TTT |
| W90H | CAT |
| W90M | ATG |
| W90R | CGG |
| W90E | GAG |
| W90N | AAT |
| W90Q | CAG |
| E91N | AAT |
| E91R | CGG |
| E91W | TGG |
| E91G | GGG |
| E91V | GTG |
| E91Y | TAT |
| E91C | TGT |
| E91H | CAT |
| E91T | ACG |
| E91S | AGT |
| E91A | GCG |
| E91I | ATT |
| E91D | GAT |
| E91F | TTT |
| E91L | TTG |
| Q92V | GTT |
| Q92Y | TAT |
| Q92L | CTG |
| Q92N | AAT |
| Q92E | GAG |
| Q92I | ATT |
| Q92T | ACT |
| Q92G | GGT |
| Q92P | CCG |
| Q92W | TGG |
| Q92F | TTT |
| Q92S | TCG |
| Q92R | CGG |
| Q92K | AAG |
| Q92A | GCT |
| T93A | GCG |
| T93L | CTT |
| T93M | ATG |
| T93N | AAT |
| T93V | GTG |
| T93I | ATT |
| T93D | GAT |
| T93S | TCG |
| T93R | CGG |
| T93W | TGG |
| T93F | TTT |
| T93P | CCT |
| T103R | CGG |
| T103Y | TAT |
| T103N | AAT |
| T103C | TGT |
| T103Q | CAG |
| T103W | TGG |
| T103P | CCG |
| T103A | GCG |
| T103G | GGG |
| T103K | AAG |
| P104G | GGG |
| P104E | GAG |
| P104T | ACT |
| P104F | TTT |
| P104R | CGT |
| P104D | GAT |
| P104C | TGT |
| P104Q | CAG |
| P104V | GTG |
| P104Y | TAT |
| P104H | CAT |
| P104L | TTG |
| P104S | TCG |
| P104A | GCG |
| P104M | ATG |
| D105A | GCT |
| D105C | TGT |
| D105F | TTT |
| D105G | GGT |
| D105I | ATT |
| D105L | CTG |
| D105M | ATG |
| D105N | AAT |
| D105P | CCT |
| D105R | CGG |
| D105S | TCG |
| D105T | ACG |
| D105V | GTT |
| D105W | TGG |
| D105E | GAG |
| L106P | CCG |
| L106D | GAT |
| L106N | AAT |
| L106G | GGT |
| L106M | ATG |
| L106A | GCT |
| L106R | CGG |
| L106Y | TAT |
| E116A | GCG |
| E116C | TGT |
| E116D | GAT |
| E116F | TTT |
| E116G | GGT |
| E116H | CAT |
| E116I | ATT |
| E116K | AAG |
| E116L | CTG |
| E116M | ATG |
| E116N | AAT |
| E116P | CCG |
| E116Q | CAG |
| E116R | AGG |
| E116S | TCT |
| K117H | CAT |
| K117T | ACG |
| K117Q | CAG |
| K117E | GAG |
| K117A | GCG |
| K117F | TTT |
| K117D | GAT |
| K117N | AAT |
| K117G | GGT |
| K117W | TGG |
| K117Y | TAT |
| K117L | TTG |
| K117S | AGT |
| K117P | CCG |
| K117R | AGG |
| A118G | GGG |
| A118R | CGT |
| A118W | TGG |
| A118K | AAG |
| A118P | CCT |
| A118V | GTG |
| A118L | TTG |
| A118D | GAT |
| A118S | AGT |
| A118F | TTT |
| A118I | ATT |
| A118H | CAT |
| A118E | GAG |
| A118Q | CAG |
| A118T | ACT |
| F119G | GGG |
| F119T | ACT |
| F119R | CGG |
| L128A | GCG |
| L128D | GAT |
| L128V | GTG |
| L128W | TGG |
| L128C | TGT |
| L128K | AAG |
| T129G | GGT |
| T129A | GCT |
| T129C | TGT |
| T129K | AAG |
| T129F | TTT |
| T129Y | TAT |
| T129S | TCG |
| T129R | CGG |
| T129V | GTT |
| T129L | CTT |
| T129H | CAT |
| T129P | CCT |
| T129E | GAG |
| T129I | ATT |
| T129M | ATG |
| F130L | CTG |
| F130P | CCT |
| F130C | TGT |
| F130R | CGG |
| F130Y | TAT |
| F130H | CAT |
| F130I | ATT |
| F130V | GTT |
| F130K | AAG |
| F130T | ACT |
| F130E | GAG |
| F130A | GCG |
| F130N | AAT |
| F130G | GGT |
| F130S | AGT |
| T131F | TTT |
| T131P | CCG |
| T131A | GCG |
| T131S | TCT |
| T131G | GGT |
| T131I | ATT |
| T131L | CTT |
| T131H | CAT |
| T131Q | CAG |
| T131D | GAT |
| T131E | GAG |
| T131C | TGT |
| M141S | AGT |
| M141C | TGT |
| M141L | CTG |
| M141A | GCG |
| M141D | GAT |
| M141W | TGG |
| M141G | GGT |
| M141H | CAT |
| M141Y | TAT |
| M141N | AAT |
| I142L | CTG |
| I142M | ATG |
| I142G | GGT |
| I142K | AAG |
| I142A | GCT |
| I142N | AAT |
| I142W | TGG |
| I142P | CCG |
| I142Q | CAG |
| I142Y | TAT |
| I142V | GTG |
| I142T | ACT |
| I142R | CGG |
| I142S | AGT |
| I142F | TTT |
| S143P | CCG |
| S143C | TGT |
| S143E | GAG |
| S143G | GGT |
| S143H | CAT |
| S143R | CGT |
| S143L | TTG |
| S143Q | CAG |
| S143N | AAT |
| S143W | TGG |
| S143A | GCT |
| S143T | ACT |
| S143Y | TAT |
| S143M | ATG |
| S143I | ATT |
| F144K | AAG |
| F144M | ATG |
| F144E | GAG |
| F144S | AGT |
| F144L | CTG |
| F144W | TGG |
| F144P | CCG |
| F144R | CGG |
| P154L | CTT |
| P154C | TGT |
| P154S | TCT |
| P154K | AAG |
| P154I | ATT |
| P154A | GCT |
| P154T | ACG |
| P154H | CAT |
| P154Y | TAT |
| P154N | AAT |
| P154F | TTT |
| P154R | CGT |
| P154Q | CAG |
| F155S | TCT |
| F155T | ACT |
| F155G | GGT |
| F155N | AAT |
| F155R | CGG |
| F155W | TGG |
| F155L | CTG |
| F155Q | CAG |
| F155M | ATG |
| F155E | GAG |
| F155A | GCG |
| F155P | CCT |
| F155V | GTT |
| F155H | CAT |
| F155Y | TAT |
| D156H | CAT |
| D156L | CTT |
| D156E | GAG |
| D156A | GCT |
| D156W | TGG |
| D156C | TGT |
| D156P | CCT |
| D156V | GTT |
| D156K | AAG |
| D156S | TCT |
| D156G | GGG |
| D156T | ACT |
| D156Y | TAT |
| D156R | CGT |
| D156M | ATG |
| G157K | AAG |
| G157D | GAT |
| G157F | TTT |
| G157R | CGT |
| G157H | CAT |
| F166C | TGT |
| F166E | GAG |
| Q167D | GAT |
| Q167R | CGG |
| Q167A | GCG |
| Q167S | AGT |
| Q167F | TTT |
| Q167Y | TAT |
| Q167P | CCG |
| Q167T | ACT |
| Q167V | GTG |
| Q167L | CTG |
| Q167M | ATG |
| Q167N | AAT |
| Q167G | GGG |
| Q167K | AAG |
| Q167E | GAG |
| P168N | AAT |
| P168F | TTT |
| P168R | CGG |
| P168W | TGG |
| P168A | GCT |
| P168T | ACG |
| P168V | GTT |
| P168G | GGG |
| P168C | TGT |
| P168M | ATG |
| P168H | CAT |
| P168L | CTT |
| P168S | AGT |
| P168I | ATT |
| P168D | GAT |
| G169H | CAT |
| G169A | GCG |
| G169E | GAG |
| G169C | TGT |
| G169S | TCG |
| G169L | CTG |
| G169V | GTT |
| G169T | ACG |
| G169R | CGG |
| G169W | TGG |
| G169M | ATG |
| G169I | ATT |
| G169P | CCG |
| G169D | GAT |
| G169Q | CAG |
| P170L | CTT |
| D179I | ATT |
| D179R | CGT |
| D179N | AAT |
| D179W | TGG |
| D179Q | CAG |
| D179V | GTG |
| D179C | TGT |
| E180M | ATG |
| E180P | CCT |
| E180K | AAG |
| E180Y | TAT |
| E180Q | CAG |
| E180R | CGG |
| E180A | GCG |
| E180T | ACT |
| E180I | ATT |
| E180F | TTT |
| E180C | TGT |
| E180G | GGG |
| E180S | TCG |
| E180N | AAT |
| E180D | GAT |
| D181S | TCG |
| D181Q | CAG |
| D181P | CCT |
| D181Y | TAT |
| D181R | CGT |
| D181V | GTT |
| D181F | TTT |
| D181A | GCT |
| D181T | ACG |
| D181L | TTG |
| D181E | GAG |
| D181K | AAG |
| D181M | ATG |
| D181C | TGT |
| D181G | GGT |
| E182C | TGT |
| E182P | CCT |
| E182S | AGT |
| E182T | ACG |
| E182R | CGG |
| E182D | GAT |
| E182A | GCT |
| E182F | TTT |
| E182L | CTT |
| E182I | ATT |
| E182Y | TAT |
| N192S | TCG |
| N192W | TGG |
| N192G | GGG |
| N192D | GAT |
| N192V | GTG |
| N192A | GCT |
| N192T | ACT |
| N192K | AAG |
| N192C | TGT |
| N192M | ATG |
| L193P | CCG |
| L193G | GGG |
| L193F | TTT |
| L193S | TCG |
| L193W | TGG |
| L193A | GCT |
| L193R | CGT |
| L193Q | CAG |
| L193E | GAG |
| L193K | AAG |
| L193N | AAT |
| L193I | ATT |
| L193T | ACT |
| L193D | GAT |
| L193Y | TAT |
| H194S | AGT |
| H194E | GAG |
| H194K | AAG |
| H194Q | CAG |
| H194V | GTT |
| H194T | ACT |
| H194L | CTG |
| H194Y | TAT |
| H194F | TTT |
| H194G | GGT |
| H194I | ATT |
| H194W | TGG |
| H194M | ATG |
| H194A | GCT |
| H194P | CCT |
| R195C | TGT |
| R195F | TTT |
| R195W | TGG |
| R195T | ACT |
| R195L | CTG |
| R195G | GGT |
| R195Q | CAG |
| R195K | AAG |
| L205S | TCT |
| L205G | GGT |
| L205P | CCT |
| L205E | GAG |
| L205V | GTG |
| L205M | ATG |
| L205N | AAT |
| L205C | TGT |
| L205I | ATT |
| L205A | GCG |
| L205R | CGG |
| L205W | TGG |
| L205Q | CAG |
| G206I | ATT |
| G206V | GTG |
| G206A | GCG |
| G206C | TGT |
| G206S | TCG |
| G206P | CCG |
| G206L | TTG |
| G206D | GAT |
| G206M | ATG |
| G206R | CGG |
| G206Q | CAG |
| G206E | GAG |
| G206H | CAT |
| G206T | ACG |
| G206W | TGG |
| L207S | TCT |
| L207Y | TAT |
| L207A | GCG |
| L207R | CGT |
| L207P | CCG |
| L207Q | CAG |
| L207N | AAT |
| L207K | AAG |
| L207M | ATG |
| L207W | TGG |
| L207H | CAT |
| L207D | GAT |
| L207V | GTT |
| L207I | ATT |
| L207G | GGT |
| S208D | GAT |
| S208V | GTT |
| S208P | CCT |
| S208G | GGT |
| S208A | GCG |
| M217A | GCG |
| M217H | CAT |
| M217I | ATT |
| M217D | GAT |
| Y218C | TGT |
| Y218F | TTT |
| Y218W | TGG |
| Y218L | CTG |
| Y218A | GCG |
| Y218P | CCG |
| Y218R | CGG |
| Y218N | AAT |
| Y218V | GTG |
| Y218Q | CAG |
| Y218I | ATT |
| Y218D | GAT |
| Y218S | TCG |
| Y218G | GGG |
| Y218E | GAG |
| P219L | TTG |
| P219C | TGT |
| P219V | GTG |
| P219D | GAT |
| P219F | TTT |
| P219A | GCG |
| P219T | ACT |
| P219E | GAG |
| P219Q | CAG |
| P219R | CGG |
| P219H | CAT |
| P219G | GGG |
| P219K | AAG |
| P219S | TCG |
| P219W | TGG |
| S220R | CGT |
| S220A | GCG |
| S220Q | CAG |
| S220T | ACT |
| S220L | CTT |
| S220K | AAG |
| S220G | GGG |
| S220H | CAT |
| S220E | GAG |
| S220M | ATG |
| S220V | GTT |
| S220P | CCG |
| S220I | ATT |
| S220F | TTT |
| A230S | TCG |
| A230C | TGT |
| A230V | GTT |
| A230T | ACT |
| A230Y | TAT |
| A230M | ATG |
| A230N | AAT |
| A230H | CAT |
| Q231I | ATT |
| Q231A | GCT |
| Q231F | TTT |
| Q231P | CCT |
| Q231Y | TAT |
| Q231R | CGT |
| Q231L | CTG |
| Q231D | GAT |
| Q231G | GGT |
| Q231V | GTT |
| Q231W | TGG |
| Q231S | AGT |
| Q231H | CAT |
| Q231C | TGT |
| Q231M | ATG |
| D232H | CAT |
| D232G | GGG |
| D232R | CGT |
| D232P | CCT |
| D232Y | TAT |
| D232N | AAT |
| D232S | TCG |
| D232F | TTT |
| D232V | GTG |
| D232K | AAG |
| D232W | TGG |
| D232Q | CAG |
| D232E | GAG |
| D232T | ACT |
| D232L | CTG |
| D233Q | CAG |
| D233P | CCG |
| D233S | TCT |
| D233T | ACG |
| D233A | GCG |
| D233W | TGG |
| D233G | GGT |
| D233R | CGT |
| D233E | GAG |
| D233N | AAT |
| R243L | CTT |
| R243A | GCG |
| R243H | CAT |
| R243Q | CAG |
| R243S | AGT |
| R243I | ATT |
| R243C | TGT |
| R243N | AAT |
| R243Y | TAT |
| R243G | GGG |
| R243D | GAT |
| R243V | GTG |
| S244P | CCG |
| S244L | CTT |
| S244W | TGG |
| S244M | ATG |
| S244V | GTT |
| S244Q | CAG |
| S244D | GAT |
| S244E | GAG |
| S244T | ACG |
| S244H | CAT |
| S244G | GGT |
| S244A | GCT |
| S244F | TTT |
| S244Y | TAT |
| S244R | CGT |
| Q245P | CCT |
| Q245I | ATT |
| Q245F | TTT |
| Q245V | GTT |
| Q245M | ATG |
| Q245T | ACT |
| Q245E | GAG |
| Q245S | TCG |
| Q245R | CGG |
| Q245G | GGT |
| Q245H | CAT |
| Q245L | CTT |
| Q245K | AAG |
| Q245W | TGG |
| Q245C | TGT |
| N246W | TGG |
| N246R | CGG |
| N246A | GCG |
| N246F | TTT |
| N246G | GGT |
| N246P | CCT |
| T255L | TTG |
| T255H | CAT |
| P256S | AGT |
| P256V | GTG |
| P256F | TTT |
| P256Y | TAT |
| P256I | ATT |
| P256A | GCT |
| P256L | CTT |
| P256G | GGT |
| P256N | AAT |
| P256R | CGG |
| P256Q | CAG |
| P256E | GAG |
| P256K | AAG |
| P256M | ATG |
| P256C | TGT |
| K257C | TGT |
| K257M | ATG |
| K257V | GTT |
| K257A | GCT |
| K257E | GAG |
| K257S | TCT |
| K257L | CTT |
| K257I | ATT |
| K257G | GGG |
| K257N | AAT |
| K257F | TTT |
| K257W | TGG |
| K257R | CGG |
| K257P | CCG |
| K257T | ACT |
| A258Q | CAG |
| A258Y | TAT |
| A258W | TGG |
| A258G | GGG |
| A258L | TTG |
| A258F | TTT |
| A258M | ATG |
| A258N | AAT |
| A258V | GTG |
| A258T | ACG |
| A258I | ATT |
| A258D | GAT |
| A258R | CGT |
| A258E | GAG |
| A258P | CCG |
| T255L | TTG |

[0547] B. Screening

[0548] Mutant MMP-1 members of the library were screened against a fluorogenic peptide substrate IX (Mca-K-P-L-Gl-L-Dpa-A-R-NH₂; SEQ ID NO:88; R&D Systems, Minneapolis, Minn., Cat#ES010) for decreased catalytic activity at 37° C. relative to 25° C. and for sufficient protein expression as described in published U.S. Application No. 2010/0284995. Briefly, wild-type and mutant MMP-1 cDNAs derived from the library above were transformed in BL21 (DE3) cells (Stratagene or Tigen, Beiging, China) in 96 well plates. Protein expression was induced with 1 mM isopropyl-β-D-thiogalactoside (IPTG) and the cells were incubated at 25° C. with shaking. After 6 hours, the cells were pelleted by centrifugation at 6,000 g for 10 minutes and the supernatant was removed. The periplasmic protein fraction was then isolated by incubating the cells in OS buffer (200 mM Tris-HCl, pH 7.5, 20% sucrose, 1 mM EDTA) with 0.5 mg/mL of DNase, RNase, and lysozyme. The cells were centrifuged after the addition of cold water and supernatant collected.

[0549] The supernatant containing the periplasmic protein fraction were transferred to 96 well plates. MMP-1 protein in the supernatants was activated with 1 mM APMA (4-aminophenylmercuric acetate; Sigma) at either 25° C. or 37° C. Following activation, 1.6 μL of TCNB containing 620 μM Mca-K-P-L-G-L-Dpa-A-R-NH₂ fluorescent substrate was added to each well to a final concentration of 10 μM, at the indicated reaction temperature (either 25° C. or 37° C.) for 1 hour. Fluorescence was detected by measuring fluorescence in a fluorescent plate reader at 320 nm exitation/405 nm emission. Relative fluorescence units (RFU) were determined. Supernatant from wild-type hMMP-1 and plasmid/vector transformed cells were used as positive and negative controls. Duplicate reactions were performed for each sample, reaction temperature, and positive and negative control. The results are set forth in Table 10.

TABLE 10
Results of Initial Screen of MMP-1 Mutant Library

| | | | | Res. | Res. |
|---|---|---|---|---|---|
| | | | | Act. | Act. |
| hMMP-1 | Avg. RFU | Avg. RFU | Ratio | Mut/wt | Mut/wt |
| mutation | 25° C. | 37° C. | 25° C./37° C. | 25° C. | 37° C. |
| F81C | 1740.62 | 3123.63 | 0.56 | 0.35 | 0.46 |
| F81E | 871.51 | 1243.66 | 0.70 | 0.18 | 0.18 |
| F81I | 4100.22 | 5376.62 | 0.76 | 0.83 | 0.79 |
| F81L | 8890.68 | 7913.44 | 1.12 | 1.57 | 1.51 |
| F81P | 1102.23 | 1043.87 | 1.06 | 0.19 | 0.20 |
| F81S | 2527.30 | 2312.47 | 1.09 | 0.45 | 0.44 |
| F81A | 8780.53 | 7784.51 | 1.13 | 1.55 | 1.48 |
| F81M | 2545.25 | 3095.21 | 0.82 | 0.45 | 0.59 |
| F81G | 8979.05 | 7773.71 | 1.16 | 1.59 | 1.48 |
| F81T | 1564.49 | 1373.60 | 1.14 | 0.28 | 0.26 |
| F81Q | 9225.28 | 7923.69 | 1.16 | 1.63 | 1.51 |
| F81R | 8514.40 | 7454.74 | 1.14 | 1.50 | 1.42 |
| F81W | 6078.70 | 5909.04 | 1.03 | 1.07 | 1.12 |
| F81H | 8126.15 | 7360.21 | 1.10 | 1.44 | 1.40 |
| F81V | 7263.15 | 6614.17 | 1.10 | 1.28 | 1.26 |
| V82I | 535.78 | 548.02 | 0.98 | 0.06 | 0.06 |
| V82C | 4177.57 | 6476.29 | 0.65 | 0.50 | 0.72 |
| V82A | 9540.61 | 9240.92 | 1.03 | 1.14 | 1.03 |
| V82P | 599.23 | 634.69 | 0.94 | 0.07 | 0.07 |
| V82Y | 3295.59 | 6173.45 | 0.53 | 0.39 | 0.69 |
| V82M | 6824.39 | 8606.64 | 0.79 | 0.82 | 0.96 |
| V82Q | 581.51 | 652.74 | 0.89 | 0.07 | 0.07 |
| V82F | 7233.54 | 8739.45 | 0.83 | 0.87 | 0.98 |
| V82W | 6194.12 | 8397.19 | 0.74 | 0.74 | 0.94 |
| V82N | 9421.72 | 8759.51 | 1.08 | 1.13 | 0.98 |
| V82R | 603.22 | 781.77 | 0.77 | 0.07 | 0.09 |
| V82G | 8298.42 | 8911.04 | 0.93 | 0.99 | 0.99 |
| V82S | 8293.03 | 9022.13 | 0.92 | 0.99 | 1.01 |
| V82L | 6951.75 | 8694.05 | 0.80 | 0.83 | 0.97 |
| V82T | 7993.81 | 8975.05 | 0.89 | 0.96 | 1.00 |
| L83A | 8629.03 | 9023.51 | 0.96 | 1.03 | 1.01 |
| L83C | 554.26 | 567.87 | 0.98 | 0.07 | 0.06 |
| L83D | 8705.34 | 8957.38 | 0.97 | 1.04 | 1.00 |
| L83E | 9212.48 | 9265.02 | 0.99 | 1.10 | 1.03 |
| L83G | 7713.92 | 9073.74 | 0.85 | 0.92 | 1.01 |
| L83H | 6449.24 | 7800.76 | 0.83 | 0.77 | 0.87 |
| L83I | 4575.76 | 6963.24 | 0.66 | 0.55 | 0.78 |
| L83M | 5921.65 | 8064.61 | 0.73 | 0.71 | 0.90 |
| L83P | 7794.15 | 8608.36 | 0.91 | 0.93 | 0.96 |
| L83Q | 7291.24 | 8673.39 | 0.84 | 0.87 | 0.97 |
| L83R | 8509.58 | 8988.62 | 0.95 | 1.02 | 1.00 |
| L83S | 9261.79 | 9205.93 | 1.01 | 1.11 | 1.03 |
| L83T | 7549.73 | 8580.54 | 0.88 | 0.90 | 0.96 |
| L83W | 4193.18 | 6044.52 | 0.69 | 0.50 | 0.67 |
| L83Y | 7968.79 | 9051.39 | 0.88 | 0.95 | 1.01 |
| T84V | 3169.35 | 4931.29 | 0.64 | 0.64 | 0.72 |
| T84E | 498.18 | 627.84 | 0.79 | 0.10 | 0.09 |
| T84H | 7046.83 | 6974.20 | 1.01 | 1.24 | 1.33 |
| T84L | 7687.84 | 6946.59 | 1.11 | 1.36 | 1.32 |
| T84D | 7972.32 | 7331.43 | 1.09 | 1.41 | 1.39 |
| T84R | 7298.49 | 6880.17 | 1.06 | 1.29 | 1.31 |
| T84I | 6508.69 | 5860.75 | 1.11 | 1.15 | 1.11 |
| T84S | 6073.28 | 5981.85 | 1.02 | 1.07 | 1.14 |
| T84G | 8087.79 | 7200.99 | 1.12 | 1.43 | 1.37 |
| T84Q | 6275.12 | 6690.38 | 0.94 | 1.11 | 1.27 |
| T84P | 3528.37 | 3832.34 | 0.92 | 0.62 | 0.73 |
| T84A | 8718.27 | 7840.72 | 1.11 | 1.54 | 1.49 |
| T84C | 5177.89 | 5107.57 | 1.01 | 0.91 | 0.97 |
| T84Y | 4768.51 | 4818.30 | 0.99 | 0.84 | 0.92 |
| T84F | 6312.72 | 6453.46 | 0.98 | 1.10 | 1.27 |
| E85L | 1633.29 | 2148.43 | 0.76 | 0.33 | 0.31 |
| E85Q | 2834.50 | 4068.60 | 0.70 | 0.57 | 0.59 |
| E85P | 2855.52 | 3389.51 | 0.84 | 0.58 | 0.50 |
| E85T | 401.26 | 382.58 | 1.05 | 0.08 | 0.06 |
| E85K | 2293.84 | 3049.87 | 0.75 | 0.46 | 0.45 |
| E85M | 2158.30 | 2821.39 | 0.76 | 0.44 | 0.41 |
| E85G | 1767.69 | 1734.31 | 1.02 | 0.31 | 0.33 |
| E85R | 912.46 | 7286.41 | 0.13 | 0.16 | 1.39 |
| E85S | 7811.54 | 7488.09 | 1.04 | 1.38 | 1.42 |
| E85C | 6027.10 | 5938.05 | 1.01 | 1.06 | 1.13 |
| E85Y | 4449.33 | 3909.71 | 1.14 | 0.79 | 0.74 |
| E85A | 5552.19 | 5461.08 | 1.02 | 0.98 | 1.04 |
| E85N | 522.81 | 7634.45 | 0.07 | 0.09 | 1.45 |
| E85V | 7152.74 | 7011.60 | 1.02 | 1.26 | 1.33 |
| E85F | 6092.47 | 6362.37 | 0.96 | 1.06 | 1.26 |
| G86L | 2452.10 | 3232.22 | 0.76 | 0.50 | 0.47 |
| G86P | 2117.46 | 5219.90 | 0.41 | 0.43 | 0.76 |
| G86I | 1888.26 | 2293.71 | 0.82 | 0.38 | 0.34 |
| G86T | 363.85 | 380.61 | 0.96 | 0.07 | 0.06 |
| G86H | 389.15 | 372.78 | 1.04 | 0.08 | 0.05 |
| G86D | 415.45 | 406.81 | 1.02 | 0.08 | 0.06 |
| G86N | 2612.85 | 3755.02 | 0.70 | 0.53 | 0.55 |
| G86S | 8500.13 | 7717.19 | 1.10 | 1.50 | 1.47 |
| G86K | 1660.95 | 2002.39 | 0.83 | 0.29 | 0.38 |
| G86W | 1570.85 | 1690.05 | 0.93 | 0.28 | 0.32 |
| G86Y | 1829.24 | 2126.68 | 0.86 | 0.32 | 0.40 |
| G86V | 1830.80 | 2092.69 | 0.87 | 0.32 | 0.40 |
| G86C | 1784.05 | 2091.03 | 0.85 | 0.32 | 0.40 |
| G86M | 1687.28 | 2025.99 | 0.83 | 0.30 | 0.39 |
| G86F | 1897.87 | 1483.82 | 1.28 | 0.34 | 0.28 |
| N87M | 418.35 | 412.23 | 1.01 | 0.08 | 0.06 |
| N87L | 3385.42 | 4941.20 | 0.69 | 0.69 | 0.72 |
| N87P | 8762.48 | 8941.20 | 0.98 | 1.55 | 1.70 |
| N87V | 6199.21 | 7269.38 | 0.85 | 1.09 | 1.38 |
| N87R | 7761.00 | 8810.25 | 0.88 | 1.37 | 1.68 |
| N87F | 6882.19 | 4428.08 | 1.55 | 1.22 | 0.84 |
| N87S | 2083.05 | 3304.46 | 0.63 | 0.37 | 0.63 |
| N87I | 7572.66 | 8090.13 | 0.94 | 1.34 | 1.54 |
| N87C | 3291.22 | 3945.40 | 0.83 | 0.58 | 0.75 |
| N87A | 5482.33 | 6869.11 | 0.80 | 0.97 | 1.31 |
| N87G | 8060.01 | 8916.11 | 0.90 | 1.42 | 1.70 |
| N87Y | 4397.56 | 5611.87 | 0.78 | 0.78 | 1.07 |
| N87E | 5876.33 | 4763.86 | 1.23 | 1.04 | 0.91 |
| N87H | 5013.05 | 7306.33 | 0.69 | 0.89 | 1.39 |
| N87Q | 8559.37 | 9021.72 | 0.95 | 1.51 | 1.72 |
| P88C | 1255.12 | 2197.65 | 0.57 | 0.15 | 0.25 |
| P88K | 6857.61 | 8492.90 | 0.81 | 0.82 | 0.95 |
| P88W | 664.95 | 845.70 | 0.79 | 0.08 | 0.09 |
| P88G | 1694.96 | 3159.20 | 0.54 | 0.20 | 0.35 |
| P88L | 2562.59 | 3576.95 | 0.72 | 0.31 | 0.40 |
| P88Q | 4499.52 | 7270.91 | 0.62 | 0.54 | 0.81 |
| P88A | 6549.92 | 8130.83 | 0.81 | 0.78 | 0.91 |
| P88T | 6576.99 | 8126.45 | 0.81 | 0.79 | 0.91 |
| P88Y | 5515.19 | 7868.29 | 0.70 | 0.66 | 0.88 |
| P88R | 4209.25 | 6681.38 | 0.63 | 0.50 | 0.75 |
| P88H | 2580.97 | 4465.31 | 0.58 | 0.31 | 0.50 |
| P88I | 841.81 | 1249.17 | 0.67 | 0.10 | 0.14 |
| P88V | 1666.69 | 1915.49 | 0.87 | 0.20 | 0.21 |
| P88E | 971.61 | 1460.63 | 0.67 | 0.12 | 0.16 |
| P88D | 1300.22 | 1911.83 | 0.68 | 0.16 | 0.21 |
| R89V | 1163.86 | 2620.05 | 0.44 | 0.24 | 0.38 |
| R89W | 1252.89 | 1744.18 | 0.72 | 0.25 | 0.25 |
| R89M | 402.00 | 386.98 | 1.04 | 0.08 | 0.06 |
| R89A | 7883.15 | 8954.83 | 0.88 | 1.39 | 1.70 |
| R89T | 6791.27 | 6752.46 | 1.01 | 1.20 | 1.28 |
| R89G | 8957.06 | 8693.72 | 1.03 | 1.58 | 1.65 |
| R89S | 7342.24 | 4138.54 | 1.77 | 1.30 | 0.79 |
| R89K | 7679.02 | 8254.00 | 0.93 | 1.36 | 1.57 |
| R89F | 4764.35 | 5589.97 | 0.85 | 0.84 | 1.06 |
| R89Y | 5614.23 | 5949.31 | 0.94 | 0.99 | 1.13 |
| R89N | 3502.08 | 1995.86 | 1.75 | 0.62 | 0.38 |
| R89H | 3611.69 | 4222.47 | 0.86 | 0.64 | 0.80 |
| R89L | 3123.66 | 3332.30 | 0.94 | 0.55 | 0.63 |
| R89E | 1490.93 | 1265.89 | 1.18 | 0.26 | 0.24 |
| R89P | 2659.02 | 3342.56 | 0.80 | 0.47 | 0.64 |
| W90L | 394.24 | 411.82 | 0.96 | 0.08 | 0.06 |
| W90G | 448.08 | 427.28 | 1.05 | 0.09 | 0.06 |
| W90P | 444.72 | 442.65 | 1.00 | 0.09 | 0.06 |
| W90T | 397.42 | 365.04 | 1.09 | 0.08 | 0.05 |
| W90S | 443.43 | 442.72 | 1.00 | 0.09 | 0.06 |
| W90V | 384.57 | 385.18 | 1.00 | 0.08 | 0.06 |
| W90I | 443.81 | 432.28 | 1.03 | 0.09 | 0.06 |
| W90A | 497.94 | 554.07 | 0.90 | 0.10 | 0.08 |
| W90F | 730.98 | 656.84 | 1.11 | 0.15 | 0.10 |
| W90H | 498.51 | 493.15 | 1.01 | 0.10 | 0.07 |
| W90M | 512.18 | 508.03 | 1.01 | 0.10 | 0.07 |
| W90R | 1974.98 | 1695.11 | 1.17 | 0.23 | 0.19 |
| W90E | 1537.84 | 1076.32 | 1.43 | 0.18 | 0.12 |
| W90N | 1308.11 | 1001.91 | 1.31 | 0.15 | 0.11 |
| W90Q | 1392.58 | 1015.03 | 1.37 | 0.16 | 0.12 |
| E91N | 4746.43 | 6166.37 | 0.77 | 0.96 | 0.90 |
| E91R | 2760.48 | 3810.12 | 0.72 | 0.56 | 0.56 |
| E91W | 2595.35 | 5651.48 | 0.46 | 0.53 | 0.83 |
| E91G | 4826.02 | 6684.79 | 0.72 | 0.98 | 0.98 |
| E91V | 454.87 | 459.17 | 0.99 | 0.09 | 0.07 |
| E91Y | 4885.18 | 5469.16 | 0.89 | 0.99 | 0.80 |
| E91C | 3525.68 | 5567.75 | 0.63 | 0.71 | 0.81 |
| E91H | 5114.86 | 6610.88 | 0.77 | 1.04 | 0.97 |
| E91T | 442.21 | 427.42 | 1.03 | 0.09 | 0.06 |
| E91S | 8147.93 | 7696.77 | 1.06 | 0.94 | 0.87 |
| E91A | 1140.60 | 1252.34 | 0.91 | 0.13 | 0.14 |
| E91I | 8414.79 | 8744.30 | 0.96 | 0.97 | 0.99 |
| E91D | 8482.61 | 8681.73 | 0.98 | 0.98 | 0.98 |
| E91F | 1159.80 | 1117.15 | 1.04 | 0.13 | 0.13 |
| E91L | 2012.22 | 1956.07 | 1.03 | 0.23 | 0.22 |
| Q92V | 3748.94 | 5787.25 | 0.65 | 0.76 | 0.85 |
| Q92Y | 2141.40 | 5383.55 | 0.40 | 0.43 | 0.79 |
| Q92L | 2422.01 | 3765.30 | 0.64 | 0.49 | 0.55 |
| Q92N | 8685.91 | 8183.03 | 1.06 | 1.00 | 0.93 |
| Q92E | 8489.89 | 8972.33 | 0.95 | 0.98 | 1.02 |
| Q92I | 7791.35 | 8518.64 | 0.91 | 0.90 | 0.97 |
| Q92T | 8289.96 | 8916.74 | 0.93 | 0.96 | 1.01 |
| Q92G | 7218.56 | 8372.74 | 0.86 | 0.83 | 0.95 |
| Q92P | 3678.59 | 4021.57 | 0.91 | 0.43 | 0.46 |
| Q92W | 7277.76 | 8042.96 | 0.90 | 0.84 | 0.91 |
| Q92F | 8216.00 | 8989.59 | 0.91 | 0.95 | 1.02 |
| Q92S | 8760.81 | 9254.16 | 0.95 | 1.01 | 1.05 |
| Q92R | 8566.65 | 8894.65 | 0.96 | 0.99 | 1.01 |
| Q92K | 8790.93 | 9239.36 | 0.95 | 1.02 | 1.05 |
| Q92A | 8138.84 | 9037.58 | 0.90 | 0.94 | 1.02 |
| T93A | 2321.71 | 5447.47 | 0.43 | 0.47 | 0.80 |
| T93L | 541.85 | 545.89 | 0.99 | 0.11 | 0.08 |
| T93M | 5256.54 | 7088.24 | 0.74 | 1.07 | 1.04 |
| T93N | 5852.91 | 7141.52 | 0.82 | 1.19 | 1.04 |
| T93V | 7976.61 | 8668.81 | 0.92 | 0.92 | 0.98 |
| T93I | 9015.76 | 9426.26 | 0.96 | 1.04 | 1.07 |
| T93D | 8742.88 | 9032.61 | 0.97 | 1.01 | 1.02 |
| T93S | 8832.30 | 8978.09 | 0.98 | 1.02 | 1.02 |
| T93R | 8802.98 | 8782.70 | 1.00 | 1.02 | 1.00 |
| T93W | 7872.73 | 8474.20 | 0.93 | 0.91 | 0.96 |
| T93F | 4307.35 | 5656.46 | 0.76 | 0.50 | 0.64 |
| T93P | 8315.28 | 8629.67 | 0.96 | 0.96 | 0.98 |
| T93G | 4926.38 | 6453.11 | 0.76 | 0.57 | 0.73 |
| T93K | 8581.02 | 8663.14 | 0.99 | 0.99 | 0.98 |
| T93E | 8081.66 | 8373.46 | 0.97 | 0.93 | 0.95 |
| H94L | 509.44 | 507.83 | 1.00 | 0.10 | 0.07 |
| H94S | 3442.98 | 5184.16 | 0.66 | 0.70 | 0.76 |
| H94M | 7388.19 | 8302.74 | 0.89 | 0.85 | 0.94 |
| H94R | 7237.77 | 7718.22 | 0.94 | 0.84 | 0.87 |
| H94E | 8375.45 | 8466.04 | 0.99 | 0.97 | 0.96 |
| H94I | 6326.35 | 7655.54 | 0.83 | 0.73 | 0.87 |
| H94D | 7358.29 | 8057.05 | 0.91 | 0.85 | 0.91 |
| H94P | 2892.06 | 3183.37 | 0.91 | 0.33 | 0.36 |
| H94A | 8285.72 | 8772.41 | 0.94 | 0.96 | 0.99 |
| H94N | 8497.48 | 8732.16 | 0.97 | 0.98 | 0.99 |
| H94F | 6046.02 | 7839.76 | 0.77 | 0.70 | 0.89 |
| H94G | 7671.85 | 7912.46 | 0.97 | 0.89 | 0.90 |
| H94T | 7121.14 | 8100.48 | 0.88 | 0.82 | 0.92 |
| H94V | 7941.67 | 8381.81 | 0.95 | 0.92 | 0.95 |
| H94W | 6520.52 | 7583.08 | 0.86 | 0.75 | 0.86 |
| L95E | 4165.44 | 5381.52 | 0.77 | 0.48 | 0.61 |
| L95Y | 1044.63 | 1118.92 | 0.93 | 0.12 | 0.13 |
| L95R | 1328.79 | 1312.13 | 1.01 | 0.15 | 0.15 |
| L95A | 1262.99 | 1297.06 | 0.97 | 0.15 | 0.15 |
| L95G | 1090.24 | 1183.93 | 0.92 | 0.13 | 0.13 |
| L95K | 1333.28 | 1191.46 | 1.12 | 0.15 | 0.14 |
| L95S | 1077.02 | 1117.02 | 0.96 | 0.12 | 0.13 |
| L95T | 1407.58 | 1310.18 | 1.07 | 0.16 | 0.15 |
| L95H | 1270.21 | 1086.69 | 1.17 | 0.15 | 0.12 |
| L95W | 1133.63 | 1041.65 | 1.09 | 0.13 | 0.12 |
| L95V | 8390.57 | 8371.68 | 1.00 | 0.97 | 0.95 |
| L95C | 2189.50 | 2519.34 | 0.87 | 0.25 | 0.29 |
| L95P | 1084.88 | 1147.69 | 0.95 | 0.13 | 0.13 |
| L95D | 909.41 | 933.49 | 0.97 | 0.11 | 0.11 |
| L95I | 1707.98 | 2294.02 | 0.74 | 0.30 | 0.45 |
| T96E | 415.05 | 397.38 | 1.04 | 0.07 | 0.06 |
| T96R | 478.81 | 441.86 | 1.08 | 0.08 | 0.07 |
| T96P | 589.64 | 692.90 | 0.85 | 0.09 | 0.11 |
| T96S | 3055.53 | 4011.47 | 0.76 | 0.49 | 0.64 |
| T96A | 1873.45 | 2254.28 | 0.83 | 0.30 | 0.36 |
| T96L | 2337.67 | 3156.45 | 0.74 | 0.37 | 0.51 |
| T96W | 1194.79 | 1631.19 | 0.73 | 0.19 | 0.26 |
| T96N | 2674.35 | 3874.07 | 0.69 | 0.43 | 0.62 |
| T96G | 415.04 | 387.45 | 1.07 | 0.07 | 0.06 |
| T96F | 2640.74 | 3897.10 | 0.68 | 0.42 | 0.62 |
| T96Q | 1865.64 | 2509.48 | 0.74 | 0.30 | 0.40 |
| T96H | 1294.29 | 1620.22 | 0.80 | 0.21 | 0.26 |
| T96V | 1904.14 | 2730.27 | 0.70 | 0.30 | 0.44 |
| T96I | 1814.91 | 2921.26 | 0.62 | 0.29 | 0.47 |
| T96C | 701.03 | 774.48 | 0.91 | 0.11 | 0.12 |
| Y97R | 447.48 | 449.81 | 0.99 | 0.14 | 0.09 |
| Y97V | 637.70 | 789.90 | 0.81 | 0.20 | 0.16 |
| Y97A | 507.18 | 504.63 | 1.01 | 0.16 | 0.10 |
| Y97P | 488.40 | 452.67 | 1.08 | 0.15 | 0.09 |
| Y97L | 510.25 | 549.53 | 0.93 | 0.16 | 0.11 |
| Y97T | 538.83 | 600.97 | 0.90 | 0.17 | 0.12 |
| Y97K | 469.55 | 390.08 | 1.20 | 0.15 | 0.08 |
| Y97W | 3115.45 | 4974.99 | 0.63 | 0.98 | 1.01 |
| Y97H | 685.71 | 879.64 | 0.78 | 0.22 | 0.18 |
| Y97S | 482.94 | 471.85 | 1.02 | 0.15 | 0.10 |
| Y97E | 435.12 | 432.07 | 1.01 | 0.14 | 0.09 |
| Y97D | 466.89 | 455.39 | 1.03 | 0.15 | 0.09 |
| Y97N | 486.98 | 490.84 | 0.99 | 0.15 | 0.10 |
| Y97G | 521.34 | 516.64 | 1.01 | 0.11 | 0.08 |
| Y97Q | 567.66 | 575.73 | 0.99 | 0.12 | 0.08 |
| R98H | 1456.51 | 3257.97 | 0.45 | 0.46 | 0.66 |
| R98K | 2994.82 | 4670.17 | 0.64 | 0.95 | 0.95 |
| R98C | 761.34 | 938.43 | 0.81 | 0.24 | 0.19 |
| R98L | 3592.72 | 5087.24 | 0.71 | 1.14 | 1.03 |
| R98M | 3551.60 | 5834.31 | 0.61 | 1.12 | 1.18 |
| R98F | 2925.55 | 4988.31 | 0.59 | 0.92 | 1.01 |
| R98W | 833.68 | 1098.48 | 0.76 | 0.26 | 0.22 |
| R98Y | 505.91 | 479.02 | 1.06 | 0.16 | 0.10 |
| R98P | 2306.44 | 3388.72 | 0.68 | 0.73 | 0.69 |
| R98E | 1812.72 | 2769.07 | 0.65 | 0.57 | 0.56 |
| R98A | 3006.35 | 4371.72 | 0.69 | 0.95 | 0.89 |
| R98G | 1525.20 | 2367.66 | 0.64 | 0.48 | 0.48 |
| R98V | 1298.78 | 3330.10 | 0.39 | 0.26 | 0.49 |
| R98S | 4646.88 | 6142.58 | 0.76 | 0.94 | 0.90 |
| R98D | 2905.96 | 3867.31 | 0.75 | 0.33 | 0.47 |
| I99C | 514.61 | 514.66 | 1.00 | 0.16 | 0.10 |
| I99E | 550.80 | 548.33 | 1.00 | 0.17 | 0.11 |
| I99G | 588.17 | 598.60 | 0.98 | 0.19 | 0.12 |
| I99H | 749.01 | 834.15 | 0.90 | 0.24 | 0.17 |
| I99N | 691.55 | 805.73 | 0.86 | 0.22 | 0.16 |
| I99P | 567.03 | 526.02 | 1.08 | 0.18 | 0.11 |
| I99T | 1087.94 | 1583.58 | 0.69 | 0.34 | 0.32 |
| I99V | 2373.86 | 3390.37 | 0.70 | 0.75 | 0.69 |
| I99A | 654.22 | 809.57 | 0.81 | 0.13 | 0.12 |
| I99F | 2098.09 | 2958.45 | 0.71 | 0.43 | 0.43 |
| I99L | 2592.09 | 4336.89 | 0.60 | 0.53 | 0.63 |
| I99R | 561.16 | 555.21 | 1.01 | 0.11 | 0.08 |
| I99S | 616.13 | 673.46 | 0.91 | 0.12 | 0.10 |
| I99Q | 3318.21 | 4623.91 | 0.72 | 0.37 | 0.56 |
| I99W | 509.03 | 492.00 | 1.04 | 0.06 | 0.06 |
| I99Y | 690.55 | 700.48 | 0.99 | 0.08 | 0.09 |
| E100V | 3980.72 | 5009.20 | 0.79 | 1.26 | 1.01 |
| E100P | 727.82 | 785.14 | 0.93 | 0.23 | 0.16 |
| E100L | 3370.21 | 4726.28 | 0.71 | 1.06 | 0.96 |
| E100H | 1484.00 | 2354.50 | 0.63 | 0.47 | 0.48 |
| E100D | 1886.86 | 3049.67 | 0.62 | 0.60 | 0.62 |
| E100M | 3046.42 | 4566.62 | 0.67 | 0.96 | 0.92 |
| E100G | 541.78 | 567.31 | 0.95 | 0.11 | 0.08 |
| E100W | 1544.77 | 3766.06 | 0.41 | 0.31 | 0.55 |
| E100Y | 2885.60 | 4167.75 | 0.69 | 0.58 | 0.61 |
| E100R | 7410.11 | 7964.52 | 0.93 | 0.83 | 0.96 |
| E100S | 3768.09 | 4664.58 | 0.81 | 0.42 | 0.56 |
| E100T | 6985.28 | 7478.12 | 0.93 | 0.79 | 0.90 |
| E100F | 6709.27 | 7436.60 | 0.90 | 0.75 | 0.90 |
| E100I | 8824.19 | 8458.79 | 1.04 | 0.99 | 1.02 |
| E100N | 8809.68 | 8215.63 | 1.07 | 0.99 | 0.99 |
| N101M | 7907.75 | 7930.91 | 1.00 | 0.89 | 0.96 |
| N101F | 5045.54 | 5244.47 | 0.96 | 0.57 | 0.63 |
| N101L | 6427.09 | 6656.60 | 0.97 | 0.72 | 0.80 |
| N101V | 8153.10 | 7605.57 | 1.07 | 0.92 | 0.92 |
| N101H | 8863.48 | 8197.03 | 1.08 | 1.00 | 0.99 |
| N101R | 8050.92 | 7576.48 | 1.06 | 0.91 | 0.91 |
| N101C | 2651.70 | 3359.06 | 0.79 | 0.30 | 0.41 |
| N101T | 9660.15 | 8437.52 | 1.14 | 1.09 | 1.02 |
| N101P | 8232.08 | 7996.53 | 1.03 | 0.93 | 0.96 |
| N101W | 3302.54 | 3773.04 | 0.88 | 0.37 | 0.46 |
| N101K | 7396.60 | 7283.35 | 1.02 | 0.83 | 0.88 |
| N101S | 8913.81 | 8187.44 | 1.09 | 1.00 | 0.99 |
| N101D | 5424.50 | 5676.43 | 0.96 | 0.61 | 0.68 |
| N101A | 6371.04 | 6423.71 | 0.99 | 0.72 | 0.78 |
| N101Y | 3878.66 | 3898.52 | 0.99 | 0.44 | 0.47 |
| Y102R | 9027.37 | 8170.55 | 1.10 | 1.02 | 0.99 |
| Y102K | 5806.60 | 5157.24 | 1.13 | 0.65 | 0.62 |
| Y102V | 6412.64 | 6500.28 | 0.99 | 0.72 | 0.78 |
| Y102M | 6668.55 | 6964.91 | 0.96 | 0.75 | 0.84 |
| Y102P | 4670.45 | 4431.46 | 1.05 | 0.53 | 0.53 |
| Y102N | 4618.85 | 4579.81 | 1.01 | 0.52 | 0.55 |
| Y102G | 7272.09 | 6976.34 | 1.04 | 0.82 | 0.84 |
| Y102L | 3323.14 | 3802.15 | 0.87 | 0.37 | 0.46 |
| Y102D | 5174.42 | 4862.10 | 1.06 | 0.58 | 0.59 |
| Y102S | 8744.32 | 8244.11 | 1.06 | 0.98 | 0.99 |
| Y102F | 7629.25 | 8362.12 | 0.91 | 0.86 | 1.01 |
| Y102A | 7177.10 | 7304.92 | 0.98 | 0.81 | 0.88 |
| Y102E | 3375.30 | 3325.21 | 1.02 | 0.38 | 0.40 |
| Y102Q | 5644.96 | 5711.44 | 0.99 | 0.64 | 0.69 |
| Y102C | 1544.43 | 1842.83 | 0.84 | 0.17 | 0.22 |
| T103E | 619.06 | 617.97 | 1.00 | 0.20 | 0.13 |
| T103D | 848.44 | 877.46 | 0.97 | 0.27 | 0.18 |
| T103S | 761.49 | 855.80 | 0.89 | 0.24 | 0.17 |
| T103L | 855.65 | 650.61 | 1.32 | 0.27 | 0.13 |
| T103V | 822.60 | 1017.88 | 0.81 | 0.26 | 0.21 |
| T103R | 674.37 | 652.99 | 1.03 | 0.21 | 0.13 |
| T103Y | 1181.09 | 1423.76 | 0.83 | 0.37 | 0.29 |
| T103N | 3131.62 | 4822.91 | 0.65 | 0.99 | 0.98 |
| T103C | 628.62 | 604.98 | 1.04 | 0.20 | 0.12 |
| T103Q | 791.61 | 624.86 | 1.27 | 0.25 | 0.13 |
| T103W | 513.42 | 548.41 | 0.94 | 0.10 | 0.08 |
| T103P | 513.57 | 526.91 | 0.97 | 0.10 | 0.08 |
| T103A | 1058.92 | 950.05 | 1.11 | 0.21 | 0.14 |
| T103G | 749.67 | 656.69 | 1.14 | 0.15 | 0.10 |
| T103K | 884.09 | 777.94 | 1.14 | 0.18 | 0.11 |
| P104G | 602.57 | 620.78 | 0.97 | 0.19 | 0.13 |
| P104E | 4330.78 | 6029.01 | 0.72 | 1.37 | 1.22 |
| P104T | 3213.10 | 4681.67 | 0.69 | 1.02 | 0.95 |
| P104F | 2191.45 | 1923.19 | 1.14 | 0.69 | 0.39 |
| P104R | 591.46 | 5625.37 | 0.11 | 0.19 | 1.14 |
| P104D | 4022.87 | 5896.28 | 0.68 | 1.27 | 1.19 |
| P104C | 779.25 | 879.87 | 0.89 | 0.25 | 0.18 |
| P104Q | 4140.44 | 5971.62 | 0.69 | 1.31 | 1.21 |
| P104V | 2675.96 | 4161.77 | 0.64 | 0.85 | 0.84 |
| P104Y | 1907.52 | 2912.52 | 0.65 | 0.60 | 0.59 |
| P104H | 3404.74 | 5009.27 | 0.68 | 1.08 | 1.01 |
| P104L | 2981.52 | 4000.85 | 0.75 | 0.60 | 0.58 |
| P104S | 1205.11 | 2392.05 | 0.50 | 0.24 | 0.35 |
| P104A | 8861.30 | 8360.82 | 1.06 | 1.00 | 1.01 |
| P104M | 6709.44 | 7118.65 | 0.94 | 0.88 | 0.75 |
| D105A | 2674.16 | 1227.06 | 2.18 | 0.65 | 0.24 |
| D105C | 871.16 | 737.92 | 1.18 | 0.21 | 0.15 |
| D105F | 2009.56 | 1221.58 | 1.65 | 0.49 | 0.24 |
| D105G | 2407.89 | 1686.68 | 1.43 | 0.58 | 0.34 |
| D105I | 1732.38 | 1105.99 | 1.57 | 0.42 | 0.22 |
| D105L | 1563.61 | 859.56 | 1.82 | 0.38 | 0.17 |
| D105M | 2703.51 | 2920.93 | 0.93 | 0.65 | 0.58 |
| D105N | 3766.72 | 1475.08 | 2.55 | 0.91 | 0.29 |
| D105P | 856.02 | 604.56 | 1.42 | 0.21 | 0.12 |
| D105R | 3892.02 | 2016.90 | 1.93 | 0.94 | 0.40 |
| D105S | 3646.49 | 2727.22 | 1.34 | 0.88 | 0.54 |
| D105T | 2513.64 | 1729.46 | 1.45 | 0.61 | 0.34 |
| D105V | 5824.43 | 6784.65 | 0.86 | 1.41 | 1.35 |
| D105W | 2565.93 | 1855.05 | 1.38 | 0.62 | 0.37 |
| D105E | 4000.92 | 3366.64 | 1.19 | 0.59 | 0.45 |
| L106P | 793.18 | 480.45 | 1.65 | 0.16 | 0.10 |
| L106D | 455.97 | 436.46 | 1.04 | 0.09 | 0.09 |
| L106N | 579.84 | 499.77 | 1.16 | 0.12 | 0.10 |
| L106G | 778.24 | 578.12 | 1.35 | 0.16 | 0.12 |
| L106M | 2299.74 | 3704.96 | 0.62 | 0.48 | 0.74 |
| L106A | 3604.47 | 5633.39 | 0.64 | 0.75 | 1.12 |
| L106R | 658.60 | 552.82 | 1.19 | 0.14 | 0.11 |
| L106Y | 4761.33 | 5769.09 | 0.83 | 0.99 | 1.15 |
| L106T | 1604.22 | 1508.31 | 1.06 | 0.33 | 0.30 |
| L106V | 8561.50 | 8230.68 | 1.04 | 1.77 | 1.64 |
| L106H | 644.13 | 641.84 | 1.00 | 0.13 | 0.13 |
| L106F | 1776.88 | 2525.65 | 0.70 | 0.36 | 0.37 |
| L106I | 2787.16 | 4408.75 | 0.63 | 0.56 | 0.64 |
| L106C | 2995.56 | 3678.33 | 0.81 | 0.34 | 0.44 |
| L106S | 2730.64 | 2899.36 | 0.94 | 0.31 | 0.35 |
| P107L | 3183.54 | 3874.49 | 0.82 | 0.77 | 0.75 |
| P107W | 1255.79 | 1303.70 | 0.96 | 0.30 | 0.25 |
| P107T | 5673.07 | 6084.28 | 0.93 | 1.37 | 1.18 |
| P107S | 5865.31 | 6191.65 | 0.95 | 1.42 | 1.20 |
| P107R | 2981.87 | 3300.34 | 0.90 | 0.72 | 0.64 |
| P107Y | 2005.11 | 2383.15 | 0.84 | 0.48 | 0.46 |
| P107M | 3551.42 | 4031.55 | 0.88 | 0.86 | 0.78 |
| P107V | 3499.60 | 4142.87 | 0.84 | 0.85 | 0.80 |
| P107D | 3531.02 | 4095.17 | 0.86 | 0.85 | 0.80 |
| P107A | 5661.84 | 6316.88 | 0.90 | 1.37 | 1.23 |
| P107C | 786.68 | 776.20 | 1.01 | 0.19 | 0.15 |
| P107K | 3176.89 | 3653.27 | 0.87 | 0.77 | 0.71 |
| P107F | 1603.40 | 1832.50 | 0.87 | 0.39 | 0.36 |
| P107I | 2003.91 | 2369.36 | 0.85 | 0.48 | 0.46 |
| P107G | 2694.02 | 3272.63 | 0.82 | 0.65 | 0.64 |
| R108P | 4652.14 | 3388.90 | 1.37 | 0.96 | 0.67 |
| R108G | 4168.56 | 6204.10 | 0.67 | 0.86 | 1.24 |
| R108T | 1360.40 | 1652.92 | 0.82 | 0.28 | 0.33 |
| R108E | 5311.31 | 6829.34 | 0.78 | 1.10 | 1.36 |
| R108A | 5676.42 | 7183.19 | 0.79 | 1.18 | 1.43 |
| R108Y | 1527.69 | 2690.78 | 0.57 | 0.32 | 0.54 |
| R108K | 7212.78 | 9049.80 | 0.80 | 1.49 | 1.80 |
| R108C | 2092.15 | 2852.47 | 0.73 | 0.43 | 0.57 |
| R108S | 8515.31 | 8202.68 | 1.04 | 1.76 | 1.63 |
| R108F | 4264.07 | 5199.96 | 0.82 | 0.88 | 1.04 |
| R108W | 1522.39 | 2152.20 | 0.71 | 0.31 | 0.31 |
| R108I | 2968.84 | 4628.28 | 0.64 | 0.60 | 0.68 |
| R108L | 2200.90 | 3462.10 | 0.64 | 0.45 | 0.51 |
| R108N | 2820.25 | 4415.19 | 0.64 | 0.57 | 0.65 |
| R108V | 571.77 | 618.30 | 0.92 | 0.12 | 0.09 |
| A109S | 6193.70 | 7627.42 | 0.81 | 1.28 | 1.52 |
| A109R | 4933.84 | 9751.06 | 0.51 | 1.02 | 1.94 |
| A109T | 4678.95 | 6089.37 | 0.77 | 0.97 | 1.21 |
| A109W | 5152.58 | 6447.41 | 0.80 | 1.07 | 1.28 |
| A109I | 2587.03 | 4255.55 | 0.61 | 0.54 | 0.85 |
| A109Q | 3475.21 | 4698.87 | 0.74 | 0.72 | 0.94 |
| A109N | 6266.66 | 4399.73 | 1.42 | 1.30 | 0.88 |
| A109Y | 1880.37 | 1444.85 | 1.30 | 0.39 | 0.29 |
| A109G | 5864.62 | 12111.28 | 0.48 | 1.21 | 2.41 |
| A109M | 7784.21 | 8628.31 | 0.90 | 1.61 | 1.72 |
| A109D | 4410.30 | 6431.60 | 0.69 | 0.91 | 1.28 |
| A109V | 8073.90 | 8388.34 | 0.96 | 1.67 | 1.67 |
| A109E | 2859.74 | 7453.25 | 0.38 | 0.58 | 1.09 |
| A109L | 3649.92 | 5241.27 | 0.70 | 0.74 | 0.77 |
| A109H | 7206.01 | 7536.96 | 0.96 | 0.81 | 0.91 |
| D110P | 691.78 | 937.18 | 0.74 | 0.14 | 0.19 |
| D110F | 2469.89 | 3158.71 | 0.78 | 0.51 | 0.63 |
| D110Q | 3028.40 | 4201.99 | 0.72 | 0.63 | 0.84 |
| D110R | 756.25 | 1109.97 | 0.68 | 0.16 | 0.22 |
| D110M | 1094.79 | 917.81 | 1.19 | 0.23 | 0.18 |
| D110H | 3327.99 | 6569.83 | 0.51 | 0.69 | 1.31 |
| D110I | 1457.92 | 2219.69 | 0.66 | 0.30 | 0.44 |
| D110L | 1494.01 | 1991.44 | 0.75 | 0.31 | 0.40 |
| D110V | 2494.40 | 3413.88 | 0.73 | 0.52 | 0.68 |
| D110T | 2731.23 | 4170.98 | 0.65 | 0.57 | 0.83 |
| D110S | 1262.77 | 1714.94 | 0.74 | 0.26 | 0.34 |
| D110Y | 2764.78 | 5378.21 | 0.51 | 0.57 | 1.07 |
| D110G | 510.14 | 537.48 | 0.95 | 0.10 | 0.08 |
| D110C | 827.23 | 996.83 | 0.83 | 0.17 | 0.15 |
| D110A | 4179.59 | 5112.44 | 0.82 | 0.47 | 0.62 |
| V111E | 779.81 | 1134.36 | 0.69 | 0.16 | 0.23 |
| V111A | 1964.87 | 2890.23 | 0.68 | 0.41 | 0.58 |
| V111S | 2947.29 | 4188.33 | 0.70 | 0.61 | 0.83 |
| V111W | 601.19 | 580.46 | 1.04 | 0.12 | 0.12 |
| V111G | 833.15 | 974.76 | 0.85 | 0.17 | 0.19 |
| V111Y | 813.12 | 942.64 | 0.86 | 0.17 | 0.19 |
| V111P | 923.36 | 696.55 | 1.33 | 0.19 | 0.14 |
| V111L | 1070.50 | 1565.39 | 0.68 | 0.22 | 0.31 |
| V111D | 591.79 | 576.36 | 1.03 | 0.12 | 0.11 |
| V111K | 1017.96 | 1328.59 | 0.77 | 0.21 | 0.26 |
| V111T | 3551.97 | 4859.95 | 0.73 | 0.74 | 0.97 |
| V111Q | 1546.82 | 2061.98 | 0.75 | 0.32 | 0.41 |
| V111I | 4959.51 | 6699.66 | 0.74 | 1.03 | 1.33 |
| V111C | 843.17 | 943.89 | 0.89 | 0.17 | 0.14 |
| V111R | 2401.69 | 2925.16 | 0.82 | 0.27 | 0.35 |
| D112A | 1419.86 | 2167.48 | 0.66 | 0.29 | 0.43 |
| D112M | 1668.58 | 2249.91 | 0.74 | 0.35 | 0.45 |
| D112V | 2683.45 | 3699.41 | 0.73 | 0.56 | 0.74 |
| D112R | 1072.27 | 1395.54 | 0.77 | 0.22 | 0.28 |
| D112K | 967.53 | 1261.79 | 0.77 | 0.20 | 0.25 |
| D112P | 565.23 | 589.06 | 0.96 | 0.12 | 0.12 |
| D112Q | 4681.31 | 8975.21 | 0.52 | 0.97 | 1.79 |
| D112F | 1148.89 | 1477.74 | 0.78 | 0.24 | 0.29 |
| D112G | 1824.01 | 2601.95 | 0.70 | 0.38 | 0.52 |
| D112C | 866.83 | 1034.64 | 0.84 | 0.18 | 0.21 |
| D112W | 937.80 | 1277.50 | 0.73 | 0.19 | 0.25 |
| D112T | 2538.82 | 2941.38 | 0.86 | 0.53 | 0.59 |
| D112H | 480.11 | 467.40 | 1.03 | 0.10 | 0.07 |
| D112S | 7203.69 | 7600.93 | 0.95 | 0.81 | 0.92 |
| D112I | 4020.53 | 5498.90 | 0.73 | 0.44 | 0.72 |
| D112Y | 2132.97 | 2869.86 | 0.74 | 0.23 | 0.38 |
| D112L | 2626.71 | 4159.92 | 0.63 | 0.29 | 0.55 |
| H113T | 9107.72 | 8278.01 | 1.10 | 1.03 | 1.00 |
| H113L | 9479.59 | 8454.16 | 1.12 | 1.07 | 1.02 |
| H113M | 9463.40 | 8759.43 | 1.08 | 1.07 | 1.06 |
| H113S | 9278.22 | 9159.47 | 1.01 | 1.04 | 1.11 |
| H113N | 8609.35 | 8502.46 | 1.01 | 0.97 | 1.03 |
| H113R | 7702.30 | 7852.46 | 0.98 | 0.87 | 0.95 |
| H113A | 8505.43 | 8090.18 | 1.05 | 0.96 | 0.98 |
| H113E | 9118.02 | 8443.69 | 1.08 | 1.03 | 1.02 |
| H113V | 9183.53 | 8450.30 | 1.09 | 1.03 | 1.02 |
| H113Y | 9688.60 | 8548.83 | 1.13 | 1.09 | 1.03 |
| H113F | 9472.51 | 8729.41 | 1.09 | 1.07 | 1.05 |
| H113D | 9304.42 | 4925.78 | 1.89 | 1.05 | 0.59 |
| H113W | 8683.10 | 5775.24 | 1.50 | 0.98 | 0.70 |
| H113G | 8953.60 | 8320.09 | 1.08 | 1.01 | 1.00 |
| H113P | 2987.12 | 3102.32 | 0.96 | 0.34 | 0.37 |
| A114E | 7136.25 | 7924.97 | 0.90 | 0.80 | 0.96 |
| A114S | 9211.05 | 8794.50 | 1.05 | 1.04 | 1.06 |
| A114I | 7073.18 | 7475.79 | 0.95 | 0.80 | 0.90 |
| A114P | 1691.05 | 1357.51 | 1.25 | 0.19 | 0.16 |
| A114N | 9250.51 | 8746.70 | 1.06 | 1.04 | 1.06 |
| A114L | 7749.61 | 8007.88 | 0.97 | 0.87 | 0.97 |
| A114T | 6242.22 | 6974.59 | 0.89 | 0.70 | 0.84 |
| A114F | 605.35 | 675.10 | 0.90 | 0.07 | 0.08 |
| A114V | 5527.85 | 6054.48 | 0.91 | 0.62 | 0.73 |
| A114G | 7663.26 | 7892.13 | 0.97 | 0.86 | 0.95 |
| A114C | 2412.52 | 3005.83 | 0.80 | 0.27 | 0.36 |
| A114M | 5287.05 | 5931.99 | 0.89 | 0.60 | 0.72 |
| A114R | 4454.65 | 3915.86 | 1.14 | 0.50 | 0.47 |
| A114W | 4654.58 | 5477.95 | 0.85 | 0.52 | 0.66 |
| A114Q | 8094.57 | 8337.94 | 0.97 | 0.91 | 1.01 |
| I115F | 9634.62 | 9011.34 | 1.07 | 1.08 | 1.09 |
| I115T | 1935.83 | 2379.92 | 0.81 | 0.22 | 0.29 |
| I115H | 805.66 | 825.35 | 0.98 | 0.09 | 0.10 |
| I115G | 725.85 | 626.12 | 1.16 | 0.08 | 0.08 |
| I115K | 642.87 | 920.32 | 0.70 | 0.07 | 0.11 |
| I115E | 1276.09 | 1211.16 | 1.05 | 0.14 | 0.15 |
| I115S | 796.93 | 780.25 | 1.02 | 0.09 | 0.09 |
| I115P | 626.77 | 597.01 | 1.05 | 0.07 | 0.07 |
| I115C | 1021.21 | 982.43 | 1.04 | 0.11 | 0.12 |
| I115L | 8869.57 | 8467.55 | 1.05 | 1.00 | 1.02 |
| I115Q | 732.25 | 652.35 | 1.12 | 0.08 | 0.08 |
| I115R | 750.11 | 575.36 | 1.30 | 0.08 | 0.07 |
| I115W | 2203.68 | 2304.27 | 0.96 | 0.25 | 0.28 |
| I115V | 9365.90 | 8785.30 | 1.07 | 1.05 | 1.06 |
| I115D | 694.17 | 641.97 | 1.08 | 0.08 | 0.08 |
| E116A | 9273.62 | 9051.39 | 1.02 | 1.04 | 1.09 |
| E116C | 5022.73 | 5732.42 | 0.88 | 0.57 | 0.69 |
| E116D | 9114.14 | 8594.45 | 1.06 | 1.03 | 1.04 |
| E116F | 8569.56 | 8473.84 | 1.01 | 0.96 | 1.02 |
| E116G | 8305.07 | 8358.04 | 0.99 | 0.94 | 1.01 |
| E116H | 8630.15 | 8386.63 | 1.03 | 0.97 | 1.01 |
| E116I | 9386.17 | 8740.84 | 1.07 | 1.06 | 1.05 |
| E116K | 9320.21 | 8760.44 | 1.06 | 1.05 | 1.06 |
| E116L | 8997.58 | 8736.18 | 1.03 | 1.01 | 1.05 |
| E116M | 9046.33 | 8478.98 | 1.07 | 1.02 | 1.02 |
| E116N | 8629.15 | 8503.39 | 1.01 | 0.97 | 1.03 |
| E116P | 852.91 | 806.00 | 1.06 | 0.10 | 0.10 |
| E116Q | 9480.67 | 8716.72 | 1.09 | 1.07 | 1.05 |
| E116R | 8871.32 | 8479.40 | 1.05 | 1.00 | 1.02 |
| E116S | 9714.89 | 8843.17 | 1.10 | 1.09 | 1.07 |
| K117H | 4516.51 | 4612.42 | 0.98 | 0.52 | 0.55 |
| K117T | 6149.94 | 6317.74 | 0.97 | 0.71 | 0.75 |
| K117Q | 6602.62 | 6024.00 | 1.10 | 0.77 | 0.72 |
| K117E | 668.03 | 667.32 | 1.00 | 0.08 | 0.08 |
| K117A | 7727.36 | 7375.30 | 1.05 | 0.90 | 0.88 |
| K117F | 4020.90 | 4038.83 | 1.00 | 0.47 | 0.48 |
| K117D | 5330.37 | 5924.02 | 0.90 | 0.62 | 0.70 |
| K117N | 4666.40 | 7745.69 | 0.60 | 0.54 | 0.92 |
| K117G | 7619.16 | 7218.94 | 1.06 | 0.88 | 0.86 |
| K117W | 5440.86 | 4780.56 | 1.14 | 0.63 | 0.57 |
| K117Y | 5047.23 | 4760.05 | 1.06 | 0.59 | 0.57 |
| K117L | 5277.39 | 5328.70 | 0.99 | 0.61 | 0.63 |
| K117S | 7278.89 | 6995.65 | 1.04 | 0.85 | 0.83 |
| K117P | 737.96 | 1153.03 | 0.64 | 0.09 | 0.14 |
| K117R | 8236.16 | 7677.40 | 1.07 | 0.96 | 0.91 |
| A118G | 2782.31 | 6427.69 | 0.43 | 0.32 | 0.76 |
| A118R | 4889.61 | 5639.79 | 0.87 | 0.57 | 0.67 |
| A118W | 652.55 | 465.07 | 1.40 | 0.08 | 0.06 |
| A118K | 584.59 | 543.84 | 1.07 | 0.07 | 0.06 |
| A118P | 883.04 | 810.72 | 1.09 | 0.10 | 0.10 |
| A118V | 869.06 | 754.10 | 1.15 | 0.10 | 0.09 |
| A118L | 543.99 | 523.84 | 1.04 | 0.06 | 0.06 |
| A118D | 617.40 | 468.39 | 1.32 | 0.07 | 0.06 |
| A118S | 5502.11 | 8251.39 | 0.67 | 0.64 | 0.98 |
| A118F | 7092.17 | 7315.30 | 0.97 | 0.82 | 0.87 |
| A118I | 556.24 | 456.62 | 1.22 | 0.06 | 0.05 |
| A118H | 482.33 | 466.40 | 1.03 | 0.06 | 0.06 |
| A118E | 560.55 | 406.52 | 1.38 | 0.07 | 0.05 |
| A118Q | 517.05 | 477.18 | 1.08 | 0.06 | 0.06 |
| A118T | 745.83 | 665.63 | 1.12 | 0.13 | 0.13 |
| F119G | 2058.01 | 3284.43 | 0.63 | 0.24 | 0.39 |
| F119T | 4492.83 | 8234.56 | 0.55 | 0.52 | 0.98 |
| F119R | 648.01 | 665.21 | 0.97 | 0.08 | 0.08 |
| F119L | 8529.66 | 7666.52 | 1.11 | 0.99 | 0.91 |
| F119N | 1298.98 | 1614.30 | 0.80 | 0.15 | 0.19 |
| F119S | 3021.31 | 4383.36 | 0.69 | 0.35 | 0.52 |
| F119C | 2921.13 | 3375.91 | 0.87 | 0.34 | 0.40 |
| F119P | 567.10 | 665.80 | 0.85 | 0.07 | 0.08 |
| F119W | 4474.41 | 4610.60 | 0.97 | 0.52 | 0.55 |
| F119K | 679.32 | 762.81 | 0.89 | 0.08 | 0.09 |
| F119H | 2479.46 | 3939.67 | 0.63 | 0.29 | 0.47 |
| F119A | 7345.58 | 7881.39 | 0.93 | 0.85 | 0.94 |
| F119V | 7388.01 | 7712.75 | 0.96 | 0.86 | 0.92 |
| F119Y | 5832.62 | 6222.88 | 0.94 | 0.68 | 0.74 |
| F119E | 1044.34 | 1357.80 | 0.77 | 0.12 | 0.16 |
| Q120K | 8732.08 | 8385.78 | 1.04 | 1.01 | 1.00 |
| Q120N | 9186.34 | 8785.94 | 1.05 | 1.07 | 1.05 |
| Q120A | 613.72 | 979.68 | 0.63 | 0.07 | 0.12 |
| Q120V | 8711.16 | 8484.49 | 1.03 | 1.01 | 1.01 |
| Q120D | 5912.84 | 8887.98 | 0.67 | 0.69 | 1.06 |
| Q120R | 8845.48 | 8351.59 | 1.06 | 1.03 | 0.99 |
| Q120P | 1083.78 | 1186.17 | 0.91 | 0.13 | 0.14 |
| Q120W | 9339.94 | 7899.14 | 1.18 | 1.08 | 0.94 |
| Q120Y | 4891.24 | 8236.87 | 0.59 | 0.57 | 0.98 |
| Q120C | 5241.83 | 5502.66 | 0.95 | 0.61 | 0.65 |
| Q120H | 9155.83 | 8431.63 | 1.09 | 1.06 | 1.00 |
| Q120T | 9413.75 | 8645.01 | 1.09 | 1.09 | 1.03 |
| Q120M | 5740.33 | 8861.16 | 0.65 | 0.67 | 1.05 |
| Q120E | 8896.83 | 8424.76 | 1.06 | 1.03 | 1.00 |
| Q120G | 9176.97 | 8435.97 | 1.09 | 1.07 | 1.00 |
| L121E | 3183.74 | 2155.16 | 1.48 | 0.37 | 0.26 |
| L121Q | 2122.18 | 3128.11 | 0.68 | 0.25 | 0.37 |
| L121P | 1446.80 | 1342.92 | 1.08 | 0.17 | 0.16 |
| L121R | 1129.37 | 875.68 | 1.29 | 0.13 | 0.10 |
| L121C | 1592.13 | 1145.83 | 1.39 | 0.18 | 0.14 |
| L121G | 2613.21 | 4720.78 | 0.55 | 0.30 | 0.56 |
| L121K | 4678.64 | 4882.50 | 0.96 | 0.54 | 0.58 |
| L121F | 1227.52 | 957.08 | 1.28 | 0.14 | 0.11 |
| L121I | 7406.57 | 6937.72 | 1.07 | 0.86 | 0.83 |
| L121S | 2463.24 | 3614.68 | 0.68 | 0.29 | 0.43 |
| L121V | 7973.31 | 7244.01 | 1.10 | 0.93 | 0.86 |
| L121H | 3156.18 | 2605.48 | 1.21 | 0.37 | 0.31 |
| L121T | 7283.06 | 7372.13 | 0.99 | 0.85 | 0.88 |
| L121A | 3311.41 | 4989.77 | 0.66 | 0.38 | 0.59 |
| L121N | 6619.84 | 6504.79 | 1.02 | 0.77 | 0.77 |
| W122R | 651.20 | 598.41 | 1.09 | 0.08 | 0.07 |
| W122A | 699.90 | 617.84 | 1.13 | 0.08 | 0.07 |
| W122N | 484.17 | 598.30 | 0.81 | 0.06 | 0.07 |
| W122P | 619.39 | 605.42 | 1.02 | 0.07 | 0.07 |
| W122T | 621.86 | 570.65 | 1.09 | 0.07 | 0.07 |
| W122L | 580.35 | 563.09 | 1.03 | 0.07 | 0.07 |
| W122G | 602.75 | 646.94 | 0.93 | 0.07 | 0.08 |
| W122S | 602.28 | 564.94 | 1.07 | 0.07 | 0.07 |
| W122V | 607.75 | 532.36 | 1.14 | 0.07 | 0.06 |
| W122H | 596.81 | 545.92 | 1.09 | 0.07 | 0.06 |
| W122F | 2018.83 | 3056.56 | 0.66 | 0.23 | 0.36 |
| W122Y | 667.50 | 661.98 | 1.01 | 0.08 | 0.08 |
| W122K | 2724.60 | 2334.11 | 1.17 | 0.32 | 0.28 |
| W122Q | 576.75 | 528.48 | 1.09 | 0.07 | 0.06 |
| W122E | 564.38 | 580.16 | 0.97 | 0.07 | 0.07 |
| S123D | 9453.37 | 8830.71 | 1.07 | 0.92 | 0.94 |
| S123L | 9912.51 | 9431.98 | 1.05 | 0.97 | 1.01 |
| S123A | 9881.07 | 9237.14 | 1.07 | 0.97 | 0.99 |
| S123C | 10654.40 | 8973.60 | 1.19 | 1.04 | 0.96 |
| S123I | 9679.91 | 8521.19 | 1.14 | 0.95 | 0.91 |
| S123K | 10567.78 | 9024.26 | 1.17 | 1.03 | 0.96 |
| S123N | 6481.00 | 5911.32 | 1.10 | 0.63 | 0.63 |
| S123F | 7485.79 | 8458.67 | 0.88 | 0.73 | 0.90 |
| S123Y | 7667.20 | 8806.19 | 0.87 | 0.75 | 0.94 |
| S123M | 9800.43 | 9159.15 | 1.07 | 0.96 | 0.98 |
| S123H | 10038.71 | 9099.05 | 1.10 | 0.98 | 0.97 |
| S123R | 5290.53 | 9248.50 | 0.57 | 0.52 | 0.99 |
| S123W | 2039.75 | 5970.03 | 0.34 | 0.20 | 0.64 |
| S123T | 5042.33 | 9146.80 | 0.55 | 0.49 | 0.98 |
| S123P | 884.66 | 799.56 | 1.11 | 0.09 | 0.09 |
| S123G | 10847.89 | 9512.32 | 1.14 | 1.06 | 1.02 |
| S123Q | 10841.56 | 9551.30 | 1.14 | 1.06 | 1.02 |
| S123V | 3220.29 | 4504.25 | 0.71 | 0.41 | 0.60 |
| N124G | 5601.70 | 6396.41 | 0.88 | 1.35 | 1.27 |
| N124C | 2241.39 | 2691.13 | 0.83 | 0.54 | 0.53 |
| N124V | 2966.25 | 3399.34 | 0.87 | 0.72 | 0.68 |
| N124L | 2342.72 | 2849.98 | 0.82 | 0.57 | 0.57 |
| N124T | 3872.37 | 4747.39 | 0.82 | 0.94 | 0.94 |
| N124R | 3795.95 | 4479.74 | 0.85 | 0.92 | 0.89 |
| N124M | 2818.81 | 3511.81 | 0.80 | 0.68 | 0.70 |
| N124S | 4245.94 | 5151.63 | 0.82 | 1.03 | 1.02 |
| N124P | 3825.40 | 5084.71 | 0.75 | 0.92 | 1.01 |
| N124A | 4174.53 | 4857.21 | 0.86 | 1.01 | 0.96 |
| N124K | 5006.93 | 5514.55 | 0.91 | 1.21 | 1.10 |
| N124F | 3681.53 | 4406.27 | 0.84 | 0.89 | 0.88 |
| N124W | 1506.21 | 1714.90 | 0.88 | 0.36 | 0.34 |
| N124I | 1663.57 | 1830.11 | 0.91 | 0.40 | 0.36 |
| N124D | 6218.73 | 6620.92 | 0.94 | 0.92 | 0.88 |
| V125G | 532.18 | 540.26 | 0.99 | 0.09 | 0.07 |
| V125Q | 1480.08 | 1883.56 | 0.79 | 0.26 | 0.25 |
| V125S | 2153.87 | 2966.73 | 0.73 | 0.38 | 0.39 |
| V125P | 1410.46 | 1873.09 | 0.75 | 0.25 | 0.24 |
| V125M | 1056.84 | 1118.42 | 0.94 | 0.19 | 0.15 |
| V125Y | 1484.83 | 2214.89 | 0.67 | 0.26 | 0.29 |
| V125T | 1444.16 | 1850.94 | 0.78 | 0.25 | 0.24 |
| V125A | 3246.01 | 5558.20 | 0.58 | 0.57 | 0.73 |
| V125C | 892.38 | 690.11 | 1.29 | 0.16 | 0.09 |
| V125D | 727.50 | 723.91 | 1.00 | 0.13 | 0.09 |
| V125W | 1537.82 | 1638.09 | 0.94 | 0.27 | 0.21 |
| V125R | 1087.69 | 1057.82 | 1.03 | 0.19 | 0.14 |
| V125E | 1324.10 | 1545.82 | 0.86 | 0.23 | 0.20 |
| V125F | 1360.07 | 2068.15 | 0.66 | 0.24 | 0.27 |
| V125H | 2227.75 | 2720.50 | 0.82 | 0.39 | 0.36 |
| T126K | 646.69 | 546.31 | 1.18 | 0.16 | 0.11 |
| T126V | 3034.58 | 4559.28 | 0.67 | 0.73 | 0.91 |
| T126G | 970.67 | 820.16 | 1.18 | 0.23 | 0.16 |
| T126R | 692.68 | 612.62 | 1.13 | 0.17 | 0.12 |
| T126L | 1084.98 | 970.83 | 1.12 | 0.26 | 0.19 |
| T126H | 648.90 | 592.08 | 1.10 | 0.16 | 0.12 |
| T126M | 1168.66 | 1078.26 | 1.08 | 0.28 | 0.21 |
| T126P | 684.23 | 614.07 | 1.11 | 0.17 | 0.12 |
| T126A | 2433.37 | 2923.43 | 0.83 | 0.59 | 0.58 |
| T126N | 1449.19 | 1384.47 | 1.05 | 0.35 | 0.28 |
| T126E | 697.86 | 580.78 | 1.20 | 0.17 | 0.12 |
| T126F | 642.61 | 550.97 | 1.17 | 0.16 | 0.11 |
| T126W | 632.89 | 564.16 | 1.12 | 0.15 | 0.11 |
| T126Q | 664.00 | 591.91 | 1.12 | 0.16 | 0.12 |
| T126S | 7114.42 | 6856.69 | 1.04 | 1.06 | 0.91 |
| P127C | 1713.51 | 1846.56 | 0.93 | 0.41 | 0.37 |
| P127F | 1444.31 | 1603.37 | 0.90 | 0.35 | 0.32 |
| P127T | 2193.26 | 2519.16 | 0.87 | 0.53 | 0.50 |
| P127E | 2480.57 | 3177.56 | 0.78 | 0.60 | 0.63 |
| P127W | 1399.71 | 1476.35 | 0.95 | 0.34 | 0.29 |
| P127A | 1751.82 | 1662.47 | 1.05 | 0.42 | 0.33 |
| P127S | 2842.19 | 3070.41 | 0.93 | 0.69 | 0.61 |
| P127H | 2151.26 | 1693.77 | 1.27 | 0.52 | 0.34 |
| P127Q | 1729.40 | 1882.54 | 0.92 | 0.42 | 0.37 |
| P127K | 729.23 | 657.19 | 1.11 | 0.18 | 0.13 |
| P127R | 1590.44 | 1491.10 | 1.07 | 0.38 | 0.30 |
| P127I | 1432.03 | 1464.78 | 0.98 | 0.35 | 0.29 |
| P127V | 1214.79 | 1401.27 | 0.87 | 0.29 | 0.28 |
| P127L | 1536.18 | 1604.60 | 0.96 | 0.37 | 0.32 |
| P127M | 2950.98 | 3052.79 | 0.97 | 0.71 | 0.61 |
| L128F | 1165.63 | 1269.01 | 0.92 | 0.28 | 0.25 |
| L128M | 1898.38 | 2135.63 | 0.89 | 0.46 | 0.42 |
| L128T | 756.63 | 698.21 | 1.08 | 0.18 | 0.14 |
| L128R | 919.42 | 960.28 | 0.96 | 0.22 | 0.19 |
| L128S | 764.28 | 672.98 | 1.14 | 0.18 | 0.13 |
| L128G | 738.26 | 694.65 | 1.06 | 0.18 | 0.14 |
| L128I | 1482.67 | 1715.03 | 0.86 | 0.36 | 0.34 |
| L128Q | 1042.55 | 936.43 | 1.11 | 0.25 | 0.19 |
| L128P | 792.57 | 760.45 | 1.04 | 0.19 | 0.15 |
| L128A | 769.15 | 712.50 | 1.08 | 0.19 | 0.14 |
| L128D | 682.02 | 642.58 | 1.06 | 0.16 | 0.13 |
| L128V | 1285.36 | 1696.88 | 0.76 | 0.31 | 0.34 |
| L128W | 776.89 | 664.61 | 1.17 | 0.19 | 0.13 |
| L128C | 856.43 | 770.10 | 1.11 | 0.21 | 0.15 |
| L128K | 858.27 | 846.02 | 1.01 | 0.21 | 0.17 |
| T129G | 4435.98 | 5356.41 | 0.83 | 1.07 | 1.06 |
| T129A | 2021.18 | 2774.35 | 0.73 | 0.49 | 0.55 |
| T129C | 1057.55 | 1033.96 | 1.02 | 0.26 | 0.21 |
| T129K | 3686.95 | 4446.15 | 0.83 | 0.89 | 0.88 |
| T129F | 2980.80 | 3803.12 | 0.78 | 0.72 | 0.76 |
| T129Y | 2527.88 | 2885.14 | 0.88 | 0.61 | 0.57 |
| T129S | 1649.34 | 1529.13 | 1.08 | 0.40 | 0.30 |
| T129R | 3334.95 | 3827.40 | 0.87 | 0.81 | 0.76 |
| T129V | 4967.86 | 5698.42 | 0.87 | 1.20 | 1.13 |
| T129L | 1649.57 | 1692.51 | 0.97 | 0.40 | 0.34 |
| T129H | 3019.81 | 3803.29 | 0.79 | 0.73 | 0.76 |
| T129P | 647.52 | 619.28 | 1.05 | 0.16 | 0.12 |
| T129E | 3205.16 | 3919.94 | 0.82 | 0.77 | 0.78 |
| T129I | 3967.14 | 4452.39 | 0.89 | 0.96 | 0.88 |
| T129M | 4118.98 | 5214.21 | 0.79 | 1.00 | 1.04 |
| F130L | 1452.17 | 1651.58 | 0.88 | 0.25 | 0.23 |
| F130P | 703.36 | 797.39 | 0.88 | 0.12 | 0.11 |
| F130C | 803.88 | 939.50 | 0.86 | 0.14 | 0.13 |
| F130R | 613.42 | 687.58 | 0.89 | 0.10 | 0.09 |
| F130Y | 2355.45 | 3604.50 | 0.65 | 0.40 | 0.49 |
| F130H | 1209.72 | 1960.40 | 0.62 | 0.21 | 0.27 |
| F130I | 4480.99 | 5648.72 | 0.79 | 0.76 | 0.77 |
| F130V | 3403.91 | 4744.33 | 0.72 | 0.58 | 0.65 |
| F130K | 581.97 | 670.87 | 0.87 | 0.10 | 0.09 |
| F130T | 1529.21 | 2157.46 | 0.71 | 0.26 | 0.30 |
| F130E | 571.41 | 648.15 | 0.88 | 0.10 | 0.09 |
| F130A | 1414.89 | 1990.16 | 0.71 | 0.24 | 0.27 |
| F130N | 616.91 | 710.45 | 0.87 | 0.10 | 0.10 |
| F130G | 1553.35 | 1726.90 | 0.90 | 0.26 | 0.24 |
| F130S | 793.40 | 1055.93 | 0.75 | 0.13 | 0.14 |
| T131F | 2738.64 | 4500.49 | 0.61 | 0.48 | 0.59 |
| T131P | 540.49 | 640.19 | 0.84 | 0.10 | 0.08 |
| T131A | 3622.28 | 6028.39 | 0.60 | 0.64 | 0.79 |
| T131S | 3644.14 | 5779.25 | 0.63 | 0.64 | 0.75 |
| T131G | 3345.71 | 5523.72 | 0.61 | 0.59 | 0.72 |
| T131I | 2987.26 | 4570.78 | 0.65 | 0.53 | 0.60 |
| T131L | 3081.92 | 4518.80 | 0.68 | 0.54 | 0.59 |
| T131H | 4201.01 | 5298.03 | 0.79 | 0.74 | 0.69 |
| T131Q | 6169.43 | 8400.64 | 0.73 | 1.08 | 1.10 |
| T131D | 8629.30 | 9616.48 | 0.90 | 1.52 | 1.26 |
| T131E | 4396.59 | 6846.70 | 0.64 | 0.77 | 0.89 |
| T131C | 2232.15 | 3514.32 | 0.64 | 0.39 | 0.46 |
| T131R | 4325.73 | 6209.92 | 0.70 | 0.76 | 0.81 |
| T131Y | 2684.82 | 3916.43 | 0.69 | 0.47 | 0.51 |
| T131M | 3101.25 | 4674.29 | 0.66 | 0.55 | 0.61 |
| K132G | 3779.04 | 5835.32 | 0.65 | 0.64 | 0.80 |
| K132V | 3181.94 | 4834.70 | 0.66 | 0.54 | 0.66 |
| K132L | 2407.98 | 3744.64 | 0.64 | 0.41 | 0.51 |
| K132A | 5397.96 | 7468.39 | 0.72 | 0.92 | 1.02 |
| K132P | 4062.71 | 5742.05 | 0.71 | 0.69 | 0.79 |
| K132F | 2012.87 | 2934.12 | 0.69 | 0.34 | 0.40 |
| K132R | 7317.48 | 8467.31 | 0.86 | 1.24 | 1.16 |
| K132I | 1811.13 | 2747.29 | 0.66 | 0.31 | 0.38 |
| K132H | 3291.99 | 4588.07 | 0.72 | 0.56 | 0.63 |
| K132S | 4947.26 | 4913.96 | 1.01 | 0.84 | 0.67 |
| K132M | 4521.82 | 6773.06 | 0.67 | 0.77 | 0.93 |
| K132D | 2079.75 | 3166.80 | 0.66 | 0.35 | 0.43 |
| K132T | 2515.58 | 4096.35 | 0.61 | 0.43 | 0.56 |
| K132Y | 2363.32 | 3794.19 | 0.62 | 0.40 | 0.52 |
| K132E | 3617.16 | 5597.32 | 0.65 | 0.61 | 0.77 |
| V133G | 3203.88 | 5198.66 | 0.62 | 0.54 | 0.71 |
| V133E | 3621.55 | 5211.22 | 0.69 | 0.62 | 0.71 |
| V133T | 7931.49 | 8920.49 | 0.89 | 1.35 | 1.22 |
| V133N | 4321.90 | 6145.40 | 0.70 | 0.73 | 0.84 |
| V133A | 4764.29 | 6847.44 | 0.70 | 0.81 | 0.94 |
| V133H | 3351.37 | 4739.59 | 0.71 | 0.57 | 0.65 |
| V133P | 1405.33 | 2047.83 | 0.69 | 0.24 | 0.28 |
| V133K | 5737.27 | 7514.38 | 0.76 | 0.97 | 1.03 |
| V133R | 5773.82 | 7252.24 | 0.80 | 0.98 | 0.99 |
| V133L | 7039.08 | 8445.43 | 0.83 | 1.20 | 1.16 |
| V133W | 2475.35 | 3564.76 | 0.69 | 0.42 | 0.49 |
| V133C | 1863.63 | 2666.24 | 0.70 | 0.32 | 0.37 |
| V133D | 1792.46 | 2630.40 | 0.68 | 0.30 | 0.36 |
| V133M | 4618.45 | 6302.34 | 0.73 | 0.78 | 0.86 |
| V133S | 3077.53 | 4401.10 | 0.70 | 0.52 | 0.60 |
| S134V | 4041.51 | 5701.67 | 0.71 | 0.69 | 0.78 |
| S134H | 6079.44 | 7343.68 | 0.83 | 1.03 | 1.01 |
| S134P | 4779.98 | 6326.78 | 0.76 | 0.81 | 0.87 |
| S134G | 5540.33 | 7442.86 | 0.74 | 0.94 | 1.02 |
| S134N | 6292.89 | 7595.95 | 0.83 | 1.07 | 1.04 |
| S134R | 5129.73 | 6824.16 | 0.75 | 0.87 | 0.94 |
| S134L | 6015.18 | 8101.31 | 0.74 | 1.02 | 1.11 |
| S134Q | 4325.14 | 6159.02 | 0.70 | 0.73 | 0.84 |
| S134E | 7105.19 | 8577.53 | 0.83 | 1.21 | 1.18 |
| S134Y | 5061.86 | 6645.94 | 0.76 | 0.86 | 0.91 |
| S134A | 5179.47 | 6920.72 | 0.75 | 0.88 | 0.95 |
| S134K | 5768.02 | 7876.85 | 0.73 | 0.98 | 1.08 |
| S134D | 6958.26 | 8316.41 | 0.84 | 1.18 | 1.14 |
| S134T | 5585.98 | 7301.80 | 0.77 | 0.95 | 1.00 |
| S134C | 1950.58 | 2625.09 | 0.74 | 0.33 | 0.36 |
| E135V | 4036.77 | 5545.23 | 0.73 | 0.69 | 0.76 |
| E135M | 8700.42 | 9297.63 | 0.94 | 1.48 | 1.27 |
| E135S | 3895.80 | 5128.41 | 0.76 | 0.66 | 0.70 |
| E135D | 4858.77 | 6640.34 | 0.73 | 0.83 | 0.91 |
| E135T | 4870.41 | 6518.41 | 0.75 | 0.83 | 0.89 |
| E135L | 3276.24 | 4342.02 | 0.75 | 0.56 | 0.59 |
| E135A | 5143.68 | 7429.20 | 0.69 | 0.87 | 1.02 |
| E135W | 3407.93 | 4761.19 | 0.72 | 0.58 | 0.65 |
| E135F | 3206.26 | 4561.41 | 0.70 | 0.54 | 0.63 |
| E135P | 1077.62 | 1567.43 | 0.69 | 0.18 | 0.21 |
| E135R | 815.91 | 921.41 | 0.89 | 0.14 | 0.13 |
| E135N | 4626.44 | 6661.57 | 0.69 | 0.79 | 0.91 |
| E135H | 6074.22 | 7339.12 | 0.83 | 1.03 | 1.01 |
| E135Q | 5656.70 | 7144.49 | 0.79 | 0.96 | 0.98 |
| E135I | 2140.04 | 5232.08 | 0.41 | 0.36 | 0.72 |
| G136V | 1813.26 | 2616.78 | 0.69 | 0.31 | 0.36 |
| G136W | 993.10 | 1243.43 | 0.80 | 0.17 | 0.17 |
| G136D | 3591.52 | 5274.69 | 0.68 | 0.61 | 0.72 |
| G136M | 3515.40 | 5367.37 | 0.65 | 0.60 | 0.74 |
| G136N | 3503.65 | 5155.57 | 0.68 | 0.60 | 0.71 |
| G136A | 3559.58 | 5813.34 | 0.61 | 0.60 | 0.80 |
| G136L | 2187.68 | 3866.01 | 0.57 | 0.37 | 0.53 |
| G136C | 905.15 | 1515.22 | 0.60 | 0.15 | 0.21 |
| G136P | 3234.60 | 4934.89 | 0.66 | 0.55 | 0.68 |
| G136T | 2555.79 | 3746.36 | 0.68 | 0.43 | 0.51 |
| G136R | 2716.62 | 4398.06 | 0.62 | 0.46 | 0.60 |
| G136S | 3375.11 | 4670.21 | 0.72 | 0.57 | 0.64 |
| G136I | 2006.39 | 3604.58 | 0.56 | 0.34 | 0.49 |
| G136H | 3564.72 | 4804.54 | 0.74 | 0.61 | 0.66 |
| G136E | 5583.49 | 7289.45 | 0.77 | 0.95 | 1.00 |
| Q137A | 3966.25 | 6312.83 | 0.63 | 0.75 | 0.85 |
| Q137R | 3671.71 | 6256.44 | 0.59 | 0.69 | 0.84 |
| Q137G | 4573.46 | 6739.55 | 0.68 | 0.86 | 0.91 |
| Q137K | 6317.49 | 8133.50 | 0.78 | 1.19 | 1.09 |
| Q137H | 5645.75 | 7063.96 | 0.80 | 1.06 | 0.95 |
| Q137P | 5676.99 | 7744.50 | 0.73 | 1.07 | 1.04 |
| Q137S | 5384.46 | 7395.46 | 0.73 | 1.01 | 1.00 |
| Q137L | 5870.03 | 8003.53 | 0.73 | 1.10 | 1.08 |
| Q137W | 3200.77 | 5519.86 | 0.58 | 0.60 | 0.74 |
| Q137F | 3505.51 | 5883.52 | 0.60 | 0.66 | 0.79 |
| Q137T | 6636.95 | 8394.25 | 0.79 | 1.25 | 1.13 |
| Q137C | 1924.03 | 2898.49 | 0.66 | 0.36 | 0.39 |
| Q137Y | 5307.87 | 7091.79 | 0.75 | 1.00 | 0.95 |
| Q137N | 5369.70 | 7661.25 | 0.70 | 1.01 | 1.03 |
| Q137E | 5683.74 | 7333.42 | 0.78 | 1.07 | 0.99 |
| A138V | 1926.65 | 3043.75 | 0.63 | 0.36 | 0.41 |
| A138L | 594.07 | 675.23 | 0.88 | 0.11 | 0.09 |
| A138P | 1481.25 | 2478.85 | 0.60 | 0.28 | 0.33 |
| A138C | 1603.91 | 2981.97 | 0.54 | 0.30 | 0.40 |
| A138T | 1740.56 | 2785.40 | 0.62 | 0.33 | 0.37 |
| A138S | 2042.67 | 2909.34 | 0.70 | 0.38 | 0.39 |
| A138R | 759.61 | 962.30 | 0.79 | 0.14 | 0.13 |
| A138G | 3108.95 | 4692.85 | 0.66 | 0.58 | 0.63 |
| A138E | 1450.57 | 2644.44 | 0.55 | 0.27 | 0.36 |
| A138H | 667.58 | 839.37 | 0.80 | 0.13 | 0.11 |
| A138M | 626.50 | 749.79 | 0.84 | 0.12 | 0.10 |
| A138Q | 1747.09 | 2754.75 | 0.63 | 0.33 | 0.37 |
| A138I | 1984.57 | 3124.09 | 0.64 | 0.37 | 0.42 |
| A138D | 601.71 | 673.39 | 0.89 | 0.11 | 0.09 |
| A138W | 595.15 | 681.04 | 0.87 | 0.11 | 0.09 |
| D139R | 639.90 | 725.74 | 0.88 | 0.12 | 0.10 |
| D139V | 733.94 | 879.96 | 0.83 | 0.14 | 0.12 |
| D139M | 820.44 | 1093.19 | 0.75 | 0.15 | 0.15 |
| D139C | 763.17 | 886.67 | 0.86 | 0.14 | 0.12 |
| D139P | 794.89 | 1048.41 | 0.76 | 0.15 | 0.14 |
| D139S | 1060.53 | 1350.12 | 0.79 | 0.20 | 0.18 |
| D139L | 802.45 | 923.25 | 0.87 | 0.15 | 0.12 |
| D139I | 759.45 | 884.92 | 0.86 | 0.14 | 0.12 |
| D139H | 1442.05 | 1944.83 | 0.74 | 0.27 | 0.26 |
| D139A | 899.50 | 1179.38 | 0.76 | 0.17 | 0.16 |
| D139G | 667.47 | 801.55 | 0.83 | 0.13 | 0.11 |
| D139F | 670.14 | 828.73 | 0.81 | 0.13 | 0.11 |
| D139N | 1743.46 | 2795.27 | 0.62 | 0.33 | 0.38 |
| D139W | 641.04 | 769.42 | 0.83 | 0.12 | 0.10 |
| D139Y | 643.83 | 701.07 | 0.92 | 0.12 | 0.09 |
| D139E | 4365.22 | 7664.89 | 0.57 | 0.48 | 1.01 |
| I140D | 447.31 | 470.26 | 0.95 | 0.08 | 0.06 |
| I140K | 470.80 | 510.28 | 0.92 | 0.08 | 0.07 |
| I140A | 521.91 | 583.80 | 0.89 | 0.09 | 0.08 |
| I140G | 514.54 | 519.88 | 0.99 | 0.09 | 0.07 |
| I140C | 552.10 | 550.46 | 1.00 | 0.10 | 0.07 |
| I140Y | 476.67 | 511.05 | 0.93 | 0.08 | 0.07 |
| I140V | 1483.60 | 2240.10 | 0.66 | 0.26 | 0.29 |
| I140W | 541.30 | 540.55 | 1.00 | 0.10 | 0.07 |
| I140F | 671.22 | 710.61 | 0.94 | 0.12 | 0.09 |
| I140H | 568.54 | 584.67 | 0.97 | 0.10 | 0.08 |
| I140L | 4551.18 | 6862.42 | 0.66 | 0.80 | 0.90 |
| I140R | 479.35 | 467.38 | 1.03 | 0.08 | 0.06 |
| I140E | 480.00 | 481.92 | 1.00 | 0.08 | 0.06 |
| I140M | 1888.65 | 2695.29 | 0.70 | 0.33 | 0.35 |
| I140T | 493.59 | 505.63 | 0.98 | 0.09 | 0.07 |
| M141E | 2661.78 | 3381.08 | 0.79 | 0.64 | 0.66 |
| M141I | 3206.64 | 3834.28 | 0.84 | 0.77 | 0.74 |
| M141R | 3645.85 | 4050.91 | 0.90 | 0.88 | 0.79 |
| M141T | 1916.97 | 2186.65 | 0.88 | 0.46 | 0.42 |
| M141P | 957.33 | 1027.91 | 0.93 | 0.23 | 0.20 |
| M141S | 2578.82 | 3190.11 | 0.81 | 0.62 | 0.62 |
| M141C | 1162.41 | 1355.08 | 0.86 | 0.28 | 0.26 |
| M141L | 3257.69 | 4218.46 | 0.77 | 0.79 | 0.82 |
| M141A | 2798.52 | 3561.95 | 0.79 | 0.68 | 0.69 |
| M141D | 1943.58 | 2586.12 | 0.75 | 0.47 | 0.50 |
| M141W | 3860.87 | 4822.22 | 0.80 | 0.93 | 0.94 |
| M141G | 1252.97 | 1525.59 | 0.82 | 0.30 | 0.30 |
| M141H | 2221.73 | 2624.41 | 0.85 | 0.54 | 0.51 |
| M141Y | 2117.90 | 2326.92 | 0.91 | 0.51 | 0.45 |
| M141N | 3446.02 | 4175.18 | 0.83 | 0.83 | 0.81 |
| I142L | 4079.65 | 6338.98 | 0.64 | 0.72 | 0.83 |
| I142M | 2514.92 | 3872.66 | 0.65 | 0.44 | 0.51 |
| I142G | 590.45 | 573.21 | 1.03 | 0.10 | 0.07 |
| I142K | 567.58 | 566.13 | 1.00 | 0.10 | 0.07 |
| I142A | 1102.77 | 1776.73 | 0.62 | 0.19 | 0.23 |
| I142N | 544.78 | 582.84 | 0.93 | 0.10 | 0.08 |
| I142W | 614.88 | 660.20 | 0.93 | 0.11 | 0.09 |
| I142P | 517.98 | 553.16 | 0.94 | 0.09 | 0.07 |
| I142Q | 561.05 | 579.03 | 0.97 | 0.10 | 0.08 |
| I142Y | 535.36 | 568.63 | 0.94 | 0.09 | 0.07 |
| I142V | 2412.99 | 3835.99 | 0.63 | 0.42 | 0.50 |
| I142T | 619.92 | 700.51 | 0.88 | 0.11 | 0.09 |
| I142R | 592.22 | 631.35 | 0.94 | 0.10 | 0.08 |
| I142S | 560.11 | 608.47 | 0.92 | 0.10 | 0.08 |
| I142F | 988.49 | 1616.93 | 0.61 | 0.17 | 0.21 |
| S143P | 681.44 | 714.91 | 0.95 | 0.13 | 0.10 |
| S143C | 1242.25 | 1638.96 | 0.76 | 0.23 | 0.22 |
| S143E | 679.14 | 698.14 | 0.97 | 0.13 | 0.09 |
| S143G | 2178.31 | 3221.72 | 0.68 | 0.41 | 0.43 |
| S143H | 1946.43 | 3055.74 | 0.64 | 0.37 | 0.41 |
| S143R | 5284.60 | 7026.38 | 0.75 | 0.99 | 0.95 |
| S143L | 1855.11 | 3143.09 | 0.59 | 0.35 | 0.42 |
| S143Q | 4008.07 | 5922.69 | 0.68 | 0.75 | 0.80 |
| S143N | 3447.12 | 4827.78 | 0.71 | 0.65 | 0.65 |
| S143W | 1164.49 | 1414.47 | 0.82 | 0.22 | 0.19 |
| S143A | 4862.16 | 6797.05 | 0.72 | 0.91 | 0.91 |
| S143T | 3510.83 | 4873.23 | 0.72 | 0.66 | 0.66 |
| S143Y | 2566.36 | 3755.42 | 0.68 | 0.48 | 0.51 |
| S143M | 3680.60 | 6112.93 | 0.60 | 0.69 | 0.82 |
| S143I | 6798.46 | 8447.06 | 0.80 | 1.28 | 1.14 |
| F144K | 683.92 | 723.08 | 0.95 | 0.13 | 0.10 |
| F144M | 727.58 | 785.61 | 0.93 | 0.14 | 0.11 |
| F144E | 684.55 | 697.38 | 0.98 | 0.13 | 0.09 |
| F144S | 711.27 | 779.76 | 0.91 | 0.13 | 0.10 |
| F144L | 668.14 | 725.88 | 0.92 | 0.13 | 0.10 |
| F144W | 3272.56 | 4375.61 | 0.75 | 0.62 | 0.59 |
| F144P | 658.07 | 729.61 | 0.90 | 0.12 | 0.10 |
| F144R | 633.36 | 704.49 | 0.90 | 0.12 | 0.09 |
| F144N | 648.28 | 686.56 | 0.94 | 0.12 | 0.09 |
| F144C | 656.21 | 698.34 | 0.94 | 0.12 | 0.09 |
| F144G | 641.29 | 662.20 | 0.97 | 0.12 | 0.09 |
| F144T | 704.60 | 804.24 | 0.88 | 0.13 | 0.11 |
| F144Q | 679.28 | 759.34 | 0.89 | 0.13 | 0.10 |
| F144H | 766.54 | 861.04 | 0.89 | 0.14 | 0.12 |
| F144V | 664.73 | 737.66 | 0.90 | 0.12 | 0.10 |
| V145A | 5042.62 | 7103.17 | 0.71 | 0.89 | 0.93 |
| V145T | 3518.22 | 5408.09 | 0.65 | 0.62 | 0.71 |
| V145L | 4048.83 | 6522.67 | 0.62 | 0.71 | 0.85 |
| V145P | 2148.04 | 3271.70 | 0.66 | 0.38 | 0.43 |
| V145K | 4566.52 | 6542.14 | 0.70 | 0.80 | 0.85 |
| V145N | 5756.42 | 8553.91 | 0.67 | 1.01 | 1.12 |
| V145D | 3249.52 | 5915.18 | 0.55 | 0.57 | 0.77 |
| V145H | 3868.79 | 6370.16 | 0.61 | 0.68 | 0.83 |
| V145R | 5093.69 | 7494.19 | 0.68 | 0.90 | 0.98 |
| V145Q | 4550.79 | 6385.09 | 0.71 | 0.80 | 0.83 |
| V145S | 5229.00 | 7486.54 | 0.70 | 0.92 | 0.98 |
| V145G | 2139.70 | 3072.06 | 0.70 | 0.38 | 0.40 |
| V145W | 1735.30 | 3046.73 | 0.57 | 0.31 | 0.40 |
| V145C | 1652.16 | 3231.89 | 0.51 | 0.29 | 0.42 |
| V145E | 4086.60 | 6893.09 | 0.59 | 0.72 | 0.90 |
| R146T | 4145.84 | 6737.53 | 0.62 | 0.78 | 0.91 |
| R146L | 2149.16 | 3444.38 | 0.62 | 0.40 | 0.46 |
| R146N | 4441.83 | 6346.03 | 0.70 | 0.83 | 0.85 |
| R146H | 2791.26 | 3298.03 | 0.85 | 0.52 | 0.44 |
| R146Q | 4232.35 | 6620.08 | 0.64 | 0.80 | 0.89 |
| R146K | 5360.91 | 7104.88 | 0.75 | 1.01 | 0.96 |
| R146C | 776.54 | 868.97 | 0.89 | 0.15 | 0.12 |
| R146S | 8627.00 | 9288.66 | 0.93 | 1.62 | 1.25 |
| R146D | 3803.07 | 5389.79 | 0.71 | 0.71 | 0.73 |
| R146A | 4939.79 | 6859.12 | 0.72 | 0.93 | 0.92 |
| R146Y | 3175.81 | 5447.89 | 0.58 | 0.60 | 0.73 |
| R146P | 3019.88 | 2923.15 | 1.03 | 0.57 | 0.39 |
| R146V | 3662.01 | 6193.78 | 0.59 | 0.69 | 0.83 |
| R146E | 2538.71 | 3832.21 | 0.66 | 0.48 | 0.52 |
| R146F | 1272.11 | 2074.69 | 0.61 | 0.24 | 0.28 |
| G147R | 7744.82 | 8412.88 | 0.92 | 1.45 | 1.25 |
| G147F | 7821.91 | 7899.45 | 0.99 | 1.47 | 1.18 |
| G147I | 1451.75 | 1461.30 | 0.99 | 0.27 | 0.22 |
| G147L | 1325.33 | 1787.45 | 0.74 | 0.25 | 0.27 |
| G147A | 2288.45 | 2655.58 | 0.86 | 0.43 | 0.40 |
| G147E | 1802.97 | 2340.36 | 0.77 | 0.34 | 0.35 |
| G147H | 6234.09 | 7432.44 | 0.84 | 1.17 | 1.11 |
| G147W | 5140.21 | 6807.71 | 0.76 | 0.96 | 1.01 |
| G147T | 5531.13 | 7240.25 | 0.76 | 1.04 | 1.08 |
| G147C | 6950.51 | 7385.23 | 0.94 | 1.30 | 1.10 |
| G147S | 3071.28 | 3887.91 | 0.79 | 0.58 | 0.58 |
| G147V | 4516.19 | 5576.27 | 0.81 | 0.85 | 0.83 |
| G147Q | 6879.67 | 7686.98 | 0.89 | 1.29 | 1.14 |
| G147M | 6059.54 | 7381.69 | 0.82 | 1.14 | 1.10 |
| G147P | 494.94 | 392.93 | 1.26 | 0.07 | 0.05 |
| D148R | 5874.44 | 7069.98 | 0.83 | 1.10 | 1.05 |
| D148I | 4934.66 | 6621.95 | 0.75 | 0.93 | 0.99 |
| D148T | 5534.68 | 6527.74 | 0.85 | 1.04 | 0.97 |
| D148G | 5545.91 | 6487.49 | 0.85 | 1.04 | 0.97 |
| D148L | 1738.87 | 2136.70 | 0.81 | 0.33 | 0.32 |
| D148V | 4521.62 | 5307.74 | 0.85 | 0.85 | 0.79 |
| D148A | 7276.18 | 7955.06 | 0.91 | 1.36 | 1.18 |
| D148W | 3622.09 | 4894.24 | 0.74 | 0.68 | 0.73 |
| D148P | 7311.56 | 7404.67 | 0.99 | 1.37 | 1.10 |
| D148S | 3190.82 | 3936.89 | 0.81 | 0.60 | 0.59 |
| D148K | 2414.59 | 3115.25 | 0.78 | 0.45 | 0.46 |
| D148E | 2457.68 | 3171.30 | 0.77 | 0.46 | 0.47 |
| D148M | 928.12 | 1156.79 | 0.80 | 0.17 | 0.17 |
| D148N | 5136.96 | 5810.99 | 0.88 | 0.96 | 0.87 |
| D148C | 2617.98 | 3259.70 | 0.80 | 0.49 | 0.49 |
| H149W | 578.88 | 610.12 | 0.95 | 0.10 | 0.08 |
| H149A | 574.51 | 606.50 | 0.95 | 0.10 | 0.08 |
| H149L | 562.23 | 585.57 | 0.96 | 0.10 | 0.08 |
| H149C | 532.13 | 536.84 | 0.99 | 0.09 | 0.07 |
| H149Q | 547.46 | 565.60 | 0.97 | 0.10 | 0.07 |
| H149T | 545.99 | 567.99 | 0.96 | 0.10 | 0.07 |
| H149Y | 553.52 | 575.93 | 0.96 | 0.10 | 0.08 |
| H149P | 502.45 | 522.17 | 0.96 | 0.09 | 0.07 |
| H149V | 515.00 | 521.68 | 0.99 | 0.09 | 0.07 |
| H149R | 481.87 | 534.48 | 0.90 | 0.08 | 0.07 |
| H149G | 492.47 | 525.75 | 0.94 | 0.09 | 0.07 |
| H149E | 476.14 | 472.99 | 1.01 | 0.08 | 0.06 |
| H149S | 481.76 | 508.54 | 0.95 | 0.08 | 0.07 |
| H149I | 510.38 | 533.47 | 0.96 | 0.09 | 0.07 |
| H149N | 542.00 | 555.29 | 0.98 | 0.10 | 0.07 |
| R150S | 4221.17 | 4687.08 | 0.90 | 0.58 | 0.66 |
| R150E | 9557.47 | 8282.03 | 1.15 | 1.31 | 1.17 |
| R150G | 10002.15 | 8470.68 | 1.18 | 1.37 | 1.19 |
| R150M | 8614.46 | 8306.99 | 1.04 | 1.18 | 1.17 |
| R150P | 2291.14 | 828.28 | 2.77 | 0.31 | 0.12 |
| R150T | 9808.17 | 8294.42 | 1.18 | 1.35 | 1.17 |
| R150W | 8373.53 | 7574.51 | 1.11 | 1.15 | 1.07 |
| R150A | 10175.13 | 8554.82 | 1.19 | 1.40 | 1.20 |
| R150N | 10191.05 | 8571.32 | 1.19 | 1.40 | 1.21 |
| R150K | 9471.29 | 8346.99 | 1.13 | 1.30 | 1.18 |
| R150L | 9751.98 | 8444.63 | 1.15 | 1.34 | 1.19 |
| R150V | 6869.28 | 6604.61 | 1.04 | 1.20 | 1.30 |
| R150D | 7230.41 | 6033.28 | 1.20 | 1.26 | 1.19 |
| R150I | 3120.05 | 4082.34 | 0.76 | 0.39 | 0.55 |
| R150H | 8281.04 | 8056.17 | 1.03 | 1.05 | 1.08 |
| D151R | 576.24 | 545.21 | 1.06 | 0.11 | 0.08 |
| D151F | 626.76 | 601.08 | 1.04 | 0.12 | 0.09 |
| D151P | 670.23 | 610.90 | 1.10 | 0.13 | 0.09 |
| D151W | 691.38 | 656.86 | 1.05 | 0.13 | 0.10 |
| D151Q | 634.58 | 619.91 | 1.02 | 0.12 | 0.09 |
| D151L | 638.24 | 627.06 | 1.02 | 0.12 | 0.09 |
| D151S | 612.74 | 579.48 | 1.06 | 0.11 | 0.09 |
| D151G | 1073.32 | 733.89 | 1.46 | 0.20 | 0.11 |
| D151A | 635.33 | 608.12 | 1.04 | 0.12 | 0.09 |
| D151N | 631.72 | 612.41 | 1.03 | 0.12 | 0.09 |
| D151K | 648.63 | 635.47 | 1.02 | 0.12 | 0.09 |
| D151Y | 744.90 | 724.43 | 1.03 | 0.14 | 0.11 |
| D151V | 586.23 | 585.19 | 1.00 | 0.11 | 0.09 |
| D151T | 589.61 | 587.04 | 1.00 | 0.11 | 0.09 |
| D151M | 2945.18 | 605.81 | 4.86 | 0.55 | 0.09 |
| N152G | 9852.70 | 8326.15 | 1.18 | 1.35 | 1.17 |
| N152C | 6322.44 | 7849.36 | 0.81 | 0.87 | 1.11 |
| N152F | 9762.67 | 8643.34 | 1.13 | 1.34 | 1.22 |
| N152L | 9176.14 | 8510.93 | 1.08 | 1.26 | 1.20 |
| N152P | 7767.98 | 7907.66 | 0.98 | 1.07 | 1.11 |
| N152R | 8348.81 | 7893.25 | 1.06 | 1.14 | 1.11 |
| N152H | 3318.01 | 4257.74 | 0.78 | 0.46 | 0.60 |
| N152T | 7155.46 | 7180.94 | 1.00 | 0.98 | 1.01 |
| N152Y | 8343.23 | 7992.79 | 1.04 | 1.14 | 1.13 |
| N152K | 7868.59 | 7956.82 | 0.99 | 1.08 | 1.12 |
| N152D | 10221.41 | 8616.74 | 1.19 | 1.40 | 1.21 |
| N152W | 5717.25 | 7086.82 | 0.81 | 0.78 | 1.00 |
| N152I | 10161.44 | 8648.89 | 1.17 | 1.39 | 1.22 |
| N152A | 6669.94 | 5660.16 | 1.18 | 1.17 | 1.12 |
| N152S | 4607.85 | 8096.31 | 0.57 | 0.58 | 1.08 |
| S153I | 2873.12 | 2619.74 | 1.10 | 0.39 | 0.37 |
| S153R | 4799.14 | 4905.35 | 0.98 | 0.66 | 0.69 |
| S153K | 1002.00 | 1199.78 | 0.84 | 0.14 | 0.17 |
| S153C | 1934.36 | 3181.56 | 0.61 | 0.27 | 0.45 |
| S153G | 6175.12 | 6148.70 | 1.00 | 0.85 | 0.87 |
| S153H | 9759.94 | 8837.02 | 1.10 | 1.34 | 1.24 |
| S153L | 1285.63 | 1575.63 | 0.82 | 0.18 | 0.22 |
| S153V | 8993.77 | 8047.48 | 1.12 | 1.23 | 1.13 |
| S153T | 10530.07 | 8798.72 | 1.20 | 1.44 | 1.24 |
| S153P | 9442.29 | 8513.31 | 1.11 | 1.29 | 1.20 |
| S153A | 644.02 | 569.42 | 1.13 | 0.09 | 0.08 |
| S153F | 10583.60 | 8979.56 | 1.18 | 1.45 | 1.26 |
| S153D | 8477.40 | 8662.71 | 0.98 | 1.16 | 1.22 |
| S153Q | 6654.12 | 7947.98 | 0.84 | 0.91 | 1.12 |
| S153Y | 10164.62 | 8758.66 | 1.16 | 1.39 | 1.23 |
| P154V | 1257.75 | 1273.72 | 0.99 | 0.24 | 0.19 |
| P154W | 3838.51 | 2992.41 | 1.28 | 0.72 | 0.45 |
| P154L | 5826.55 | 6782.07 | 0.86 | 1.09 | 1.01 |
| P154C | 3097.69 | 3692.51 | 0.84 | 0.58 | 0.55 |
| P154S | 7417.09 | 8143.14 | 0.91 | 1.39 | 1.21 |
| P154K | 2407.68 | 1639.28 | 1.47 | 0.45 | 0.24 |
| P154I | 7298.30 | 7549.63 | 0.97 | 1.37 | 1.12 |
| P154A | 2043.76 | 2680.62 | 0.76 | 0.38 | 0.40 |
| P154T | 1763.73 | 2075.38 | 0.85 | 0.33 | 0.31 |
| P154H | 1072.51 | 1021.04 | 1.05 | 0.20 | 0.15 |
| P154Y | 946.74 | 834.91 | 1.13 | 0.18 | 0.12 |
| P154N | 1122.04 | 1229.36 | 0.91 | 0.21 | 0.18 |
| P154F | 845.38 | 757.86 | 1.12 | 0.16 | 0.11 |
| P154R | 1975.77 | 1915.36 | 1.03 | 0.37 | 0.29 |
| P154Q | 2228.56 | 2374.11 | 0.94 | 0.42 | 0.35 |
| F155S | 894.19 | 833.57 | 1.07 | 0.17 | 0.12 |
| F155T | 1137.71 | 1084.01 | 1.05 | 0.21 | 0.16 |
| F155G | 807.68 | 718.82 | 1.12 | 0.15 | 0.11 |
| F155N | 715.78 | 688.72 | 1.04 | 0.13 | 0.10 |
| F155R | 702.49 | 695.27 | 1.01 | 0.13 | 0.10 |
| F155W | 715.40 | 693.53 | 1.03 | 0.13 | 0.10 |
| F155L | 1322.13 | 864.19 | 1.53 | 0.25 | 0.13 |
| F155Q | 731.28 | 738.56 | 0.99 | 0.14 | 0.11 |
| F155M | 8252.43 | 8163.55 | 1.01 | 1.55 | 1.22 |
| F155E | 685.90 | 683.12 | 1.00 | 0.13 | 0.10 |
| F155A | 1250.93 | 760.12 | 1.65 | 0.23 | 0.11 |
| F155P | 666.89 | 658.85 | 1.01 | 0.13 | 0.10 |
| F155V | 681.25 | 679.13 | 1.00 | 0.13 | 0.10 |
| F155H | 696.34 | 683.06 | 1.02 | 0.13 | 0.10 |
| F155Y | 676.73 | 629.34 | 1.08 | 0.13 | 0.09 |
| D156H | 2722.09 | 2081.55 | 1.31 | 0.51 | 0.31 |
| D156L | 2548.30 | 1597.53 | 1.60 | 0.48 | 0.24 |
| D156E | 6300.50 | 6871.25 | 0.92 | 1.18 | 1.02 |
| D156A | 2679.29 | 1734.45 | 1.54 | 0.50 | 0.26 |
| D156W | 1575.39 | 1268.36 | 1.24 | 0.30 | 0.19 |
| D156C | 2842.85 | 2704.37 | 1.05 | 0.53 | 0.40 |
| D156P | 1002.13 | 998.80 | 1.00 | 0.19 | 0.15 |
| D156V | 1400.88 | 766.80 | 1.83 | 0.26 | 0.11 |
| D156K | 1292.89 | 966.62 | 1.34 | 0.24 | 0.14 |
| D156S | 969.70 | 837.57 | 1.16 | 0.18 | 0.12 |
| D156G | 794.14 | 709.60 | 1.12 | 0.15 | 0.11 |
| D156T | 2871.09 | 1843.03 | 1.56 | 0.54 | 0.27 |
| D156Y | 3406.50 | 3113.95 | 1.09 | 0.64 | 0.46 |
| D156R | 2431.23 | 1545.89 | 1.57 | 0.46 | 0.23 |
| D156M | 817.96 | 502.82 | 1.63 | 0.12 | 0.07 |
| G157K | 677.09 | 562.66 | 1.20 | 0.09 | 0.08 |
| G157D | 603.28 | 513.64 | 1.17 | 0.08 | 0.07 |
| G157F | 9535.19 | 8450.24 | 1.13 | 1.31 | 1.19 |
| G157R | 704.56 | 540.98 | 1.30 | 0.10 | 0.08 |
| G157H | 608.42 | 567.38 | 1.07 | 0.08 | 0.08 |
| G157L | 582.39 | 476.09 | 1.22 | 0.08 | 0.07 |
| G157N | 721.55 | 534.46 | 1.35 | 0.10 | 0.08 |
| G157Y | 654.13 | 541.41 | 1.21 | 0.09 | 0.08 |
| G157S | 924.62 | 596.70 | 1.55 | 0.13 | 0.08 |
| G157T | 669.55 | 551.99 | 1.21 | 0.09 | 0.08 |
| G157A | 861.29 | 552.54 | 1.56 | 0.12 | 0.08 |
| G157Q | 655.49 | 522.72 | 1.25 | 0.09 | 0.07 |
| G157P | 635.63 | 591.49 | 1.07 | 0.09 | 0.08 |
| G157V | 654.45 | 573.19 | 1.14 | 0.09 | 0.08 |
| G157M | 716.52 | 615.65 | 1.16 | 0.10 | 0.09 |
| P158S | 7974.07 | 7118.62 | 1.12 | 1.09 | 1.00 |
| P158Y | 7544.63 | 6885.81 | 1.10 | 1.03 | 0.97 |
| P158R | 7142.54 | 6214.55 | 1.15 | 0.98 | 0.88 |
| P158L | 9290.77 | 6775.04 | 1.37 | 1.27 | 0.95 |
| P158V | 10642.99 | 8919.30 | 1.19 | 1.46 | 1.26 |
| P158C | 6284.97 | 4792.49 | 1.31 | 0.86 | 0.67 |
| P158A | 9579.29 | 8514.00 | 1.13 | 1.31 | 1.20 |
| P158W | 5175.38 | 3078.22 | 1.68 | 0.71 | 0.43 |
| P158I | 10312.96 | 8597.26 | 1.20 | 1.41 | 1.21 |
| P158F | 6595.54 | 4090.71 | 1.61 | 0.90 | 0.58 |
| P158Q | 10928.51 | 8709.20 | 1.25 | 1.50 | 1.23 |
| P158T | 4204.23 | 3507.76 | 1.20 | 0.53 | 0.47 |
| P158G | 6277.86 | 5496.27 | 1.14 | 0.79 | 0.73 |
| P158K | 6860.82 | 6680.30 | 1.03 | 0.87 | 0.89 |
| P158N | 3656.04 | 3874.48 | 0.94 | 0.46 | 0.52 |
| P158D | 8959.02 | 7355.10 | 1.22 | 0.98 | 0.96 |
| G159R | 6441.49 | 5914.02 | 1.09 | 0.88 | 0.83 |
| G159S | 6594.46 | 6573.14 | 1.00 | 0.90 | 0.93 |
| G159Q | 3996.96 | 4391.10 | 0.91 | 0.55 | 0.62 |
| G159P | 596.30 | 564.24 | 1.06 | 0.08 | 0.08 |
| G159V | 2453.98 | 732.46 | 3.35 | 0.34 | 0.10 |
| G159K | 554.74 | 515.44 | 1.08 | 0.08 | 0.07 |
| G159A | 5157.14 | 4685.20 | 1.10 | 0.71 | 0.66 |
| G159Y | 1029.19 | 752.76 | 1.37 | 0.14 | 0.11 |
| G159E | 4327.74 | 4027.23 | 1.07 | 0.59 | 0.57 |
| G159T | 5059.91 | 1734.12 | 2.92 | 0.69 | 0.24 |
| G159M | 5905.06 | 4874.00 | 1.21 | 0.75 | 0.65 |
| G159I | 5725.99 | 5357.20 | 1.07 | 0.72 | 0.72 |
| G159W | 6787.40 | 6287.71 | 1.08 | 0.86 | 0.84 |
| G159L | 8231.62 | 7638.64 | 1.08 | 1.04 | 1.02 |
| G159C | 2897.77 | 3053.86 | 0.95 | 0.37 | 0.41 |
| G160A | 2080.01 | 2823.12 | 0.74 | 0.60 | 0.58 |
| G160H | 2001.10 | 3085.22 | 0.65 | 0.57 | 0.63 |
| G160N | 3546.69 | 5339.11 | 0.66 | 1.02 | 1.09 |
| G160W | 4334.72 | 3946.12 | 1.10 | 1.24 | 0.80 |
| G160R | 2347.11 | 3791.36 | 0.62 | 0.67 | 0.77 |
| G160P | 1047.77 | 929.25 | 1.13 | 0.30 | 0.19 |
| G160I | 1794.48 | 1596.11 | 1.12 | 0.51 | 0.33 |
| G160M | 2506.95 | 3576.91 | 0.70 | 0.72 | 0.73 |
| G160C | 580.68 | 627.99 | 0.92 | 0.17 | 0.13 |
| G160Q | 4740.98 | 6839.68 | 0.69 | 1.36 | 1.39 |
| G160V | 3284.36 | 3030.37 | 1.08 | 0.94 | 0.62 |
| G160S | 2991.02 | 4281.08 | 0.70 | 0.86 | 0.87 |
| G160E | 3899.28 | 4071.63 | 0.96 | 1.12 | 0.83 |
| G160L | 3396.11 | 4411.61 | 0.77 | 0.97 | 0.90 |
| G160T | 3844.32 | 3943.21 | 0.97 | 1.10 | 0.80 |
| N161S | 1251.34 | 2417.50 | 0.52 | 0.36 | 0.49 |
| N161C | 1591.15 | 2710.58 | 0.59 | 0.46 | 0.55 |
| N161L | 4840.46 | 7275.68 | 0.67 | 1.39 | 1.48 |
| N161R | 6437.08 | 7915.53 | 0.81 | 1.85 | 1.61 |
| N161G | 3755.93 | 6728.88 | 0.56 | 1.08 | 1.37 |
| N161W | 3135.58 | 3994.07 | 0.79 | 0.90 | 0.81 |
| N161Y | 5507.52 | 7319.79 | 0.75 | 1.58 | 1.49 |
| N161E | 5410.44 | 8192.46 | 0.66 | 1.55 | 1.67 |
| N161P | 1231.02 | 1593.36 | 0.77 | 0.35 | 0.32 |
| N161T | 7464.29 | 9082.12 | 0.82 | 2.14 | 1.85 |
| N161H | 2727.71 | 5034.74 | 0.54 | 0.78 | 1.03 |
| N161I | 8070.21 | 9914.56 | 0.81 | 2.31 | 2.02 |
| N161V | 5238.40 | 7429.22 | 0.71 | 1.50 | 1.51 |
| N161F | 3890.45 | 6624.80 | 0.59 | 1.12 | 1.35 |
| N161Q | 4690.72 | 7412.73 | 0.63 | 1.35 | 1.51 |
| L162A | 584.17 | 505.94 | 1.15 | 0.17 | 0.10 |
| L162G | 582.48 | 602.57 | 0.97 | 0.17 | 0.12 |
| L162C | 475.91 | 466.85 | 1.02 | 0.14 | 0.10 |
| L162P | 514.26 | 519.71 | 0.99 | 0.15 | 0.11 |
| L162R | 492.19 | 498.99 | 0.99 | 0.14 | 0.10 |
| L162I | 2948.11 | 4018.68 | 0.73 | 0.85 | 0.82 |
| L162S | 473.63 | 459.28 | 1.03 | 0.14 | 0.09 |
| L162D | 512.72 | 487.18 | 1.05 | 0.15 | 0.10 |
| L162M | 1013.31 | 1138.86 | 0.89 | 0.29 | 0.23 |
| L162E | 563.63 | 631.85 | 0.89 | 0.16 | 0.13 |
| L162T | 473.46 | 477.00 | 0.99 | 0.14 | 0.10 |
| L162Y | 484.26 | 519.58 | 0.93 | 0.14 | 0.11 |
| L162F | 484.37 | 469.30 | 1.03 | 0.14 | 0.10 |
| L162W | 463.12 | 457.12 | 1.01 | 0.13 | 0.09 |
| L162Q | 480.75 | 481.03 | 1.00 | 0.14 | 0.10 |
| A163R | 562.68 | 563.06 | 1.00 | 0.16 | 0.11 |
| A163G | 819.22 | 999.88 | 0.82 | 0.23 | 0.20 |
| A163Y | 562.12 | 549.69 | 1.02 | 0.16 | 0.11 |
| A163P | 557.10 | 559.72 | 1.00 | 0.16 | 0.11 |
| A163S | 572.70 | 542.75 | 1.06 | 0.16 | 0.11 |
| A163L | 532.98 | 539.88 | 0.99 | 0.15 | 0.11 |
| A163C | 528.01 | 546.64 | 0.97 | 0.15 | 0.11 |
| A163K | 510.99 | 502.63 | 1.02 | 0.15 | 0.10 |
| A163V | 567.33 | 572.66 | 0.99 | 0.16 | 0.12 |
| A163F | 931.85 | 1182.48 | 0.79 | 0.27 | 0.24 |
| A163E | 560.80 | 539.21 | 1.04 | 0.16 | 0.11 |
| A163T | 538.98 | 537.66 | 1.00 | 0.15 | 0.11 |
| A163Q | 586.94 | 586.24 | 1.00 | 0.17 | 0.12 |
| A163I | 554.29 | 579.47 | 0.96 | 0.16 | 0.12 |
| A163N | 575.87 | 580.49 | 0.99 | 0.17 | 0.12 |
| H164L | 547.21 | 565.25 | 0.97 | 0.16 | 0.12 |
| H164M | 552.91 | 590.51 | 0.94 | 0.16 | 0.12 |
| H164K | 575.53 | 589.33 | 0.98 | 0.17 | 0.12 |
| H164P | 573.34 | 570.59 | 1.00 | 0.16 | 0.12 |
| H164C | 551.45 | 576.69 | 0.96 | 0.16 | 0.12 |
| H164R | 558.91 | 553.87 | 1.01 | 0.16 | 0.11 |
| H164A | 549.93 | 598.96 | 0.92 | 0.16 | 0.12 |
| H164V | 567.08 | 579.35 | 0.98 | 0.16 | 0.12 |
| H164S | 4849.81 | 6939.34 | 0.70 | 1.39 | 1.41 |
| H164N | 437.45 | 585.42 | 0.75 | 0.13 | 0.12 |
| H164G | 545.54 | 547.89 | 1.00 | 0.16 | 0.11 |
| H164F | 540.67 | 537.69 | 1.01 | 0.16 | 0.11 |
| H164Y | 558.66 | 548.15 | 1.02 | 0.16 | 0.11 |
| H164Q | 566.62 | 555.39 | 1.02 | 0.16 | 0.11 |
| H164E | 569.92 | 612.16 | 0.93 | 0.16 | 0.12 |
| A165W | 583.56 | 591.99 | 0.99 | 0.17 | 0.12 |
| A165V | 560.38 | 564.19 | 0.99 | 0.16 | 0.11 |
| A165G | 445.09 | 575.94 | 0.77 | 0.13 | 0.12 |
| A165K | 537.18 | 537.57 | 1.00 | 0.15 | 0.11 |
| A165L | 552.58 | 553.45 | 1.00 | 0.16 | 0.11 |
| A165P | 535.50 | 554.41 | 0.97 | 0.15 | 0.11 |
| A165Q | 983.84 | 1344.06 | 0.73 | 0.28 | 0.27 |
| A165D | 534.17 | 577.13 | 0.93 | 0.15 | 0.12 |
| A165H | 515.90 | 536.85 | 0.96 | 0.15 | 0.11 |
| A165F | 493.42 | 496.39 | 0.99 | 0.14 | 0.10 |
| A165S | 390.18 | 578.00 | 0.68 | 0.11 | 0.12 |
| A165T | 506.15 | 502.78 | 1.01 | 0.15 | 0.10 |
| A165R | 485.08 | 477.19 | 1.02 | 0.14 | 0.10 |
| A165N | 509.08 | 499.01 | 1.02 | 0.15 | 0.10 |
| A165M | 473.24 | 523.60 | 0.90 | 0.14 | 0.11 |
| F166G | 623.89 | 586.56 | 1.06 | 0.11 | 0.08 |
| F166S | 724.53 | 695.67 | 1.04 | 0.12 | 0.10 |
| F166L | 760.25 | 829.02 | 0.92 | 0.13 | 0.12 |
| F166V | 552.68 | 564.25 | 0.98 | 0.09 | 0.08 |
| F166P | 530.80 | 562.94 | 0.94 | 0.09 | 0.08 |
| F166N | 613.07 | 589.89 | 1.04 | 0.10 | 0.08 |
| F166R | 534.62 | 543.15 | 0.98 | 0.09 | 0.08 |
| F166A | 638.77 | 712.81 | 0.90 | 0.11 | 0.10 |
| F166K | 598.42 | 615.59 | 0.97 | 0.10 | 0.09 |
| F166H | 2770.43 | 2606.89 | 1.06 | 0.47 | 0.37 |
| F166W | 8234.80 | 8549.89 | 0.96 | 1.40 | 1.20 |
| F166I | 617.86 | 613.36 | 1.01 | 0.10 | 0.09 |
| F166M | 537.05 | 571.21 | 0.94 | 0.09 | 0.08 |
| F166C | 661.10 | 639.33 | 1.03 | 0.11 | 0.09 |
| F166E | 616.99 | 582.48 | 1.06 | 0.10 | 0.08 |
| Q167D | 4883.56 | 4579.11 | 1.07 | 0.83 | 0.64 |
| Q167R | 7660.88 | 8025.72 | 0.95 | 1.30 | 1.12 |
| Q167A | 8466.37 | 8182.70 | 1.03 | 1.44 | 1.15 |
| Q167S | 7915.08 | 8512.14 | 0.93 | 1.34 | 1.19 |
| Q167F | 8209.07 | 8535.93 | 0.96 | 1.39 | 1.20 |
| Q167Y | 5687.17 | 7642.43 | 0.74 | 0.96 | 1.07 |
| Q167P | 7513.70 | 8011.11 | 0.94 | 1.27 | 1.12 |
| Q167T | 7772.59 | 8173.09 | 0.95 | 1.32 | 1.15 |
| Q167V | 7867.97 | 8191.44 | 0.96 | 1.33 | 1.15 |
| Q167L | 7174.37 | 7937.04 | 0.90 | 1.22 | 1.11 |
| Q167M | 8005.59 | 8974.74 | 0.89 | 1.36 | 1.26 |
| Q167N | 3612.25 | 5004.93 | 0.72 | 0.61 | 0.70 |
| Q167G | 6671.99 | 7782.93 | 0.86 | 1.13 | 1.09 |
| Q167K | 6453.33 | 7646.48 | 0.84 | 1.09 | 1.07 |
| Q167E | 5009.36 | 6388.75 | 0.78 | 0.85 | 0.90 |
| P168N | 638.46 | 590.71 | 1.08 | 0.11 | 0.08 |
| P168F | 673.09 | 638.53 | 1.05 | 0.11 | 0.09 |
| P168R | 7038.51 | 7902.50 | 0.89 | 1.19 | 1.11 |
| P168W | 737.53 | 666.57 | 1.11 | 0.13 | 0.09 |
| P168A | 833.88 | 736.90 | 1.13 | 0.14 | 0.10 |
| P168T | 646.42 | 645.28 | 1.00 | 0.11 | 0.09 |
| P168V | 499.02 | 557.37 | 0.90 | 0.08 | 0.08 |
| P168G | 686.51 | 644.44 | 1.07 | 0.12 | 0.09 |
| P168C | 568.42 | 598.90 | 0.95 | 0.10 | 0.08 |
| P168M | 734.84 | 652.57 | 1.13 | 0.12 | 0.09 |
| P168H | 590.54 | 588.07 | 1.00 | 0.10 | 0.08 |
| P168L | 715.20 | 706.06 | 1.01 | 0.12 | 0.10 |
| P168S | 641.79 | 605.44 | 1.06 | 0.11 | 0.08 |
| P168I | 560.15 | 568.90 | 0.98 | 0.09 | 0.08 |
| P168D | 530.69 | 575.63 | 0.92 | 0.09 | 0.08 |
| G169H | 791.08 | 828.63 | 0.95 | 0.13 | 0.12 |
| G169A | 1556.29 | 2632.37 | 0.59 | 0.26 | 0.37 |
| G169E | 789.82 | 829.24 | 0.95 | 0.13 | 0.12 |
| G169C | 714.55 | 744.33 | 0.96 | 0.12 | 0.10 |
| G169S | 1196.93 | 1427.18 | 0.84 | 0.20 | 0.20 |
| G169L | 450.44 | 534.57 | 0.84 | 0.08 | 0.07 |
| G169V | 703.56 | 675.20 | 1.04 | 0.12 | 0.09 |
| G169T | 676.59 | 685.16 | 0.99 | 0.11 | 0.10 |
| G169R | 1119.16 | 1166.00 | 0.96 | 0.19 | 0.16 |
| G169W | 802.02 | 921.44 | 0.87 | 0.14 | 0.13 |
| G169M | 962.20 | 1133.87 | 0.85 | 0.16 | 0.16 |
| G169I | 671.79 | 677.10 | 0.99 | 0.11 | 0.09 |
| G169P | 671.60 | 683.22 | 0.98 | 0.11 | 0.10 |
| G169D | 714.59 | 766.96 | 0.93 | 0.12 | 0.11 |
| G169Q | 977.05 | 901.01 | 1.08 | 0.17 | 0.13 |
| P170L | 5969.84 | 7995.99 | 0.75 | 1.01 | 1.12 |
| P170R | 3566.07 | 5876.72 | 0.61 | 0.60 | 0.82 |
| P170I | 5073.27 | 7150.78 | 0.71 | 0.86 | 1.00 |
| P170T | 6734.46 | 8153.81 | 0.83 | 1.14 | 1.14 |
| P170F | 2114.36 | 3365.04 | 0.63 | 0.36 | 0.47 |
| P170Q | 4204.94 | 6162.63 | 0.68 | 0.71 | 0.86 |
| P170G | 5005.05 | 6924.03 | 0.72 | 0.85 | 0.97 |
| P170S | 4526.99 | 6064.79 | 0.75 | 0.77 | 0.85 |
| P170H | 4569.14 | 6879.10 | 0.66 | 0.77 | 0.96 |
| P170C | 931.84 | 2355.40 | 0.40 | 0.16 | 0.33 |
| P170M | 3323.56 | 6318.16 | 0.53 | 0.56 | 0.89 |
| P170K | 4379.75 | 6206.45 | 0.71 | 0.74 | 0.87 |
| P170W | 1794.33 | 2781.05 | 0.65 | 0.30 | 0.39 |
| P170D | 1434.38 | 1462.91 | 0.98 | 0.25 | 0.29 |
| P170A | 2733.72 | 2793.24 | 0.98 | 0.48 | 0.55 |
| G171S | 2129.39 | 3316.87 | 0.64 | 0.36 | 0.46 |
| G171M | 2104.33 | 3308.36 | 0.64 | 0.36 | 0.46 |
| G171N | 4674.81 | 6965.17 | 0.67 | 0.79 | 0.98 |
| G171P | 1570.74 | 1204.39 | 1.30 | 0.27 | 0.17 |
| G171R | 1604.06 | 2486.74 | 0.65 | 0.27 | 0.35 |
| G171Y | 1519.56 | 2342.05 | 0.65 | 0.26 | 0.33 |
| G171A | 3517.89 | 5269.99 | 0.67 | 0.60 | 0.74 |
| G171Q | 2361.29 | 3915.33 | 0.60 | 0.40 | 0.55 |
| G171H | 1662.65 | 2616.63 | 0.64 | 0.28 | 0.37 |
| G171L | 1551.95 | 2516.17 | 0.62 | 0.26 | 0.35 |
| G171W | 1068.10 | 1663.46 | 0.64 | 0.18 | 0.23 |
| G171C | 1982.45 | 3409.68 | 0.58 | 0.34 | 0.48 |
| G171K | 1324.98 | 1867.15 | 0.71 | 0.22 | 0.26 |
| G171E | 1154.96 | 1199.65 | 0.96 | 0.20 | 0.24 |
| G171D | 791.81 | 690.33 | 1.15 | 0.14 | 0.14 |
| I172Y | 7427.25 | 7893.50 | 0.94 | 0.93 | 0.95 |
| I172T | 5861.67 | 6776.91 | 0.86 | 0.73 | 0.81 |
| I172P | 6297.28 | 7073.49 | 0.89 | 0.79 | 0.85 |
| I172A | 4666.76 | 6048.64 | 0.77 | 0.58 | 0.73 |
| I172L | 9324.48 | 8876.38 | 1.05 | 1.17 | 1.07 |
| I172Q | 6906.03 | 7743.66 | 0.89 | 0.87 | 0.93 |
| I172E | 3517.33 | 4567.20 | 0.77 | 0.44 | 0.55 |
| I172C | 1784.43 | 2422.99 | 0.74 | 0.22 | 0.29 |
| I172M | 9859.60 | 9096.03 | 1.08 | 1.24 | 1.09 |
| I172D | 4276.25 | 4281.60 | 1.00 | 0.54 | 0.51 |
| I172V | 9541.02 | 9174.91 | 1.04 | 1.20 | 1.10 |
| I172R | 7010.86 | 7581.48 | 0.92 | 0.88 | 0.91 |
| I172G | 2169.59 | 2350.53 | 0.92 | 0.27 | 0.28 |
| I172W | 5870.25 | 7244.46 | 0.81 | 0.74 | 0.87 |
| I172N | 5235.67 | 6253.19 | 0.84 | 0.66 | 0.75 |
| G173C | 816.12 | 1115.07 | 0.73 | 0.10 | 0.13 |
| G173L | 454.21 | 401.73 | 1.13 | 0.06 | 0.05 |
| G173K | 741.76 | 685.79 | 1.08 | 0.09 | 0.08 |
| G173W | 1278.44 | 1132.78 | 1.13 | 0.16 | 0.14 |
| G173S | 865.76 | 793.10 | 1.09 | 0.11 | 0.10 |
| G173A | 1041.22 | 1038.66 | 1.00 | 0.13 | 0.12 |
| G173R | 973.70 | 877.71 | 1.11 | 0.12 | 0.11 |
| G173N | 818.38 | 931.59 | 0.88 | 0.10 | 0.11 |
| G173T | 481.41 | 485.39 | 0.99 | 0.06 | 0.06 |
| G173D | 474.45 | 424.47 | 1.12 | 0.06 | 0.05 |
| G173V | 505.39 | 476.04 | 1.06 | 0.06 | 0.06 |
| G173F | 670.10 | 610.91 | 1.10 | 0.08 | 0.07 |
| G173M | 1085.74 | 1324.87 | 0.82 | 0.14 | 0.16 |
| G173Y | 1390.14 | 1296.93 | 1.07 | 0.17 | 0.16 |
| G173P | 458.79 | 435.59 | 1.05 | 0.06 | 0.05 |
| G174R | 452.76 | 437.41 | 1.04 | 0.06 | 0.05 |
| G174A | 491.35 | 460.84 | 1.07 | 0.06 | 0.06 |
| G174E | 489.49 | 459.57 | 1.07 | 0.06 | 0.06 |
| G174F | 598.90 | 520.03 | 1.15 | 0.08 | 0.06 |
| G174H | 577.19 | 518.90 | 1.11 | 0.07 | 0.06 |
| G174T | 505.38 | 483.64 | 1.04 | 0.06 | 0.06 |
| G174D | 476.79 | 454.13 | 1.05 | 0.06 | 0.05 |
| G174S | 641.62 | 580.36 | 1.11 | 0.08 | 0.07 |
| G174P | 525.07 | 505.41 | 1.04 | 0.07 | 0.06 |
| G174W | 538.38 | 502.50 | 1.07 | 0.07 | 0.06 |
| G174V | 504.50 | 425.17 | 1.19 | 0.06 | 0.05 |
| G174N | 506.54 | 460.95 | 1.10 | 0.06 | 0.06 |
| G174Y | 722.10 | 525.97 | 1.37 | 0.09 | 0.06 |
| G174M | 516.58 | 464.32 | 1.11 | 0.06 | 0.06 |
| G174L | 474.83 | 436.08 | 1.09 | 0.06 | 0.05 |
| D175I | 697.29 | 708.65 | 0.98 | 0.09 | 0.09 |
| D175T | 601.82 | 560.11 | 1.07 | 0.08 | 0.07 |
| D175N | 1495.98 | 1413.58 | 1.06 | 0.19 | 0.17 |
| D175V | 694.28 | 652.82 | 1.06 | 0.09 | 0.08 |
| D175S | 664.04 | 579.78 | 1.15 | 0.08 | 0.07 |
| D175R | 593.04 | 505.98 | 1.17 | 0.07 | 0.06 |
| D175G | 3147.62 | 4207.02 | 0.75 | 0.39 | 0.51 |
| D175A | 633.65 | 519.61 | 1.22 | 0.08 | 0.06 |
| D175F | 768.41 | 804.63 | 0.95 | 0.10 | 0.10 |
| D175C | 535.75 | 498.44 | 1.07 | 0.07 | 0.06 |
| D175Q | 702.74 | 633.64 | 1.11 | 0.09 | 0.08 |
| D175Y | 574.71 | 539.79 | 1.06 | 0.07 | 0.06 |
| D175L | 591.05 | 549.49 | 1.08 | 0.07 | 0.07 |
| D175H | 830.09 | 564.37 | 1.47 | 0.10 | 0.07 |
| D175P | 635.08 | 610.89 | 1.04 | 0.08 | 0.07 |
| D175E | 959.14 | 495.19 | 1.94 | 0.10 | 0.07 |
| A176F | 10486.82 | 6516.31 | 1.61 | 1.31 | 0.78 |
| A176Q | 6410.52 | 6665.27 | 0.96 | 0.80 | 0.80 |
| A176V | 8890.53 | 8780.42 | 1.01 | 1.11 | 1.05 |
| A176E | 589.82 | 546.54 | 1.08 | 0.07 | 0.07 |
| A176T | 8471.98 | 8213.74 | 1.03 | 1.06 | 0.99 |
| A176C | 6777.92 | 5924.96 | 1.14 | 0.85 | 0.71 |
| A176L | 7190.01 | 6291.31 | 1.14 | 0.90 | 0.76 |
| A176P | 639.90 | 596.40 | 1.07 | 0.08 | 0.07 |
| A176N | 1351.92 | 1250.94 | 1.08 | 0.17 | 0.15 |
| A176G | 2185.25 | 2395.33 | 0.91 | 0.27 | 0.29 |
| A176S | 3003.29 | 3887.12 | 0.77 | 0.38 | 0.47 |
| A176R | 919.15 | 792.44 | 1.16 | 0.12 | 0.10 |
| A176K | 561.66 | 522.94 | 1.07 | 0.07 | 0.06 |
| A176D | 863.82 | 792.98 | 1.09 | 0.11 | 0.10 |
| A176W | 482.38 | 414.85 | 1.16 | 0.06 | 0.06 |
| H177T | 600.03 | 570.23 | 1.05 | 0.08 | 0.07 |
| H177P | 579.96 | 544.77 | 1.06 | 0.07 | 0.07 |
| H177Q | 593.68 | 549.35 | 1.08 | 0.07 | 0.07 |
| H177A | 536.01 | 523.32 | 1.02 | 0.07 | 0.06 |
| H177S | 561.60 | 524.64 | 1.07 | 0.07 | 0.06 |
| H177G | 559.31 | 519.85 | 1.08 | 0.07 | 0.06 |
| H177W | 547.21 | 520.18 | 1.05 | 0.07 | 0.06 |
| H177L | 486.50 | 433.60 | 1.12 | 0.06 | 0.05 |
| H177V | 508.58 | 447.50 | 1.14 | 0.06 | 0.05 |
| H177I | 489.45 | 455.90 | 1.07 | 0.06 | 0.05 |
| H177R | 1913.95 | 2460.77 | 0.78 | 0.24 | 0.30 |
| H177N | 504.44 | 478.07 | 1.06 | 0.06 | 0.06 |
| H177Y | 519.99 | 467.72 | 1.11 | 0.07 | 0.06 |
| H177C | 521.67 | 489.93 | 1.06 | 0.07 | 0.06 |
| H177D | 534.87 | 505.07 | 1.06 | 0.07 | 0.06 |
| F178G | 451.96 | 391.96 | 1.15 | 0.05 | 0.05 |
| F178C | 491.76 | 403.57 | 1.22 | 0.05 | 0.05 |
| F178W | 488.21 | 441.35 | 1.11 | 0.05 | 0.05 |
| F178R | 492.40 | 411.21 | 1.20 | 0.05 | 0.05 |
| F178K | 490.87 | 494.09 | 0.99 | 0.05 | 0.06 |
| F178S | 489.84 | 507.26 | 0.97 | 0.05 | 0.06 |
| F178H | 525.63 | 500.02 | 1.05 | 0.06 | 0.06 |
| F178P | 441.78 | 397.05 | 1.11 | 0.05 | 0.05 |
| F178V | 742.61 | 814.06 | 0.91 | 0.08 | 0.10 |
| F178A | 421.25 | 367.26 | 1.15 | 0.05 | 0.04 |
| F178Q | 409.62 | 360.29 | 1.14 | 0.04 | 0.04 |
| F178Y | 861.20 | 830.80 | 1.04 | 0.09 | 0.10 |
| F178I | 1118.23 | 1329.96 | 0.84 | 0.12 | 0.16 |
| F178T | 560.54 | 487.01 | 1.15 | 0.10 | 0.10 |
| F178L | 1788.95 | 1314.38 | 1.36 | 0.31 | 0.26 |
| F178E | 524.72 | 515.62 | 1.02 | 0.06 | 0.07 |
| D179P | 526.54 | 527.98 | 1.00 | 0.06 | 0.06 |
| D179L | 444.31 | 410.22 | 1.08 | 0.05 | 0.05 |
| D179E | 520.82 | 438.27 | 1.19 | 0.06 | 0.05 |
| D179G | 470.21 | 426.64 | 1.10 | 0.05 | 0.05 |
| D179S | 461.51 | 421.09 | 1.10 | 0.05 | 0.05 |
| D179A | 464.49 | 431.24 | 1.08 | 0.05 | 0.05 |
| D179K | 483.67 | 456.75 | 1.06 | 0.05 | 0.05 |
| D179T | 451.18 | 419.76 | 1.07 | 0.05 | 0.05 |
| D179I | 425.91 | 372.56 | 1.14 | 0.05 | 0.04 |
| D179R | 473.21 | 450.10 | 1.05 | 0.05 | 0.05 |
| D179N | 2433.73 | 812.01 | 3.00 | 0.26 | 0.10 |
| D179W | 465.31 | 423.56 | 1.10 | 0.05 | 0.05 |
| D179Q | 446.51 | 414.79 | 1.08 | 0.05 | 0.05 |
| D179V | 604.63 | 490.35 | 1.23 | 0.11 | 0.10 |
| D179C | 613.81 | 503.76 | 1.22 | 0.11 | 0.10 |
| E180M | 9630.23 | 8513.41 | 1.13 | 1.04 | 1.00 |
| E180P | 523.92 | 492.75 | 1.06 | 0.06 | 0.06 |
| E180K | 4017.43 | 3889.45 | 1.03 | 0.43 | 0.46 |
| E180Y | 6655.19 | 5379.42 | 1.24 | 0.72 | 0.63 |
| E180Q | 5146.93 | 4568.90 | 1.13 | 0.56 | 0.54 |
| E180R | 6932.51 | 6309.81 | 1.10 | 0.75 | 0.74 |
| E180A | 9562.37 | 8450.18 | 1.13 | 1.04 | 1.00 |
| E180T | 3718.16 | 2425.13 | 1.53 | 0.40 | 0.29 |
| E180I | 9126.95 | 7770.14 | 1.17 | 0.99 | 0.92 |
| E180F | 7014.78 | 5382.78 | 1.30 | 0.76 | 0.63 |
| E180C | 2926.15 | 2569.75 | 1.14 | 0.32 | 0.30 |
| E180G | 5952.65 | 4547.28 | 1.31 | 1.04 | 0.90 |
| E180S | 5217.80 | 3977.60 | 1.31 | 0.91 | 0.78 |
| E180N | 6534.65 | 4843.84 | 1.35 | 1.14 | 0.96 |
| E180D | 7738.70 | 6277.22 | 1.23 | 1.35 | 1.24 |
| D181S | 9064.64 | 8368.97 | 1.08 | 0.98 | 0.99 |
| D181Q | 7875.57 | 7127.19 | 1.11 | 0.85 | 0.84 |
| D181P | 753.20 | 639.76 | 1.18 | 0.08 | 0.08 |
| D181Y | 1137.94 | 716.86 | 1.59 | 0.12 | 0.08 |
| D181R | 997.11 | 712.77 | 1.40 | 0.11 | 0.08 |
| D181V | 945.65 | 721.77 | 1.31 | 0.10 | 0.09 |
| D181F | 933.48 | 670.40 | 1.39 | 0.10 | 0.08 |
| D181A | 7936.89 | 7854.96 | 1.01 | 0.86 | 0.93 |
| D181T | 6867.00 | 6057.09 | 1.13 | 0.74 | 0.71 |
| D181L | 1727.20 | 1274.09 | 1.36 | 0.19 | 0.15 |
| D181E | 8647.28 | 8246.36 | 1.05 | 0.94 | 0.97 |
| D181K | 1087.36 | 696.83 | 1.56 | 0.12 | 0.08 |
| D181M | 3805.65 | 2986.75 | 1.27 | 0.41 | 0.35 |
| D181C | 549.29 | 447.40 | 1.23 | 0.10 | 0.09 |
| D181G | 2764.20 | 2056.56 | 1.34 | 0.48 | 0.41 |
| E182C | 601.45 | 561.21 | 1.07 | 0.07 | 0.07 |
| E182P | 606.01 | 574.24 | 1.06 | 0.07 | 0.07 |
| E182S | 967.49 | 642.27 | 1.51 | 0.10 | 0.08 |
| E182T | 2995.97 | 1779.42 | 1.68 | 0.32 | 0.21 |
| E182R | 661.10 | 622.75 | 1.06 | 0.07 | 0.07 |
| E182D | 2078.47 | 2140.28 | 0.97 | 0.23 | 0.25 |
| E182A | 619.23 | 531.55 | 1.16 | 0.07 | 0.06 |
| E182F | 1484.85 | 1677.82 | 0.88 | 0.16 | 0.20 |
| E182L | 569.35 | 524.25 | 1.09 | 0.06 | 0.06 |
| E182I | 606.88 | 519.75 | 1.17 | 0.07 | 0.06 |
| E182Y | 593.61 | 561.88 | 1.06 | 0.06 | 0.07 |
| E182Q | 1393.28 | 804.84 | 1.73 | 0.15 | 0.09 |
| E182W | 556.78 | 536.32 | 1.04 | 0.06 | 0.06 |
| E182M | 649.73 | 524.43 | 1.24 | 0.11 | 0.10 |
| E182G | 604.92 | 543.78 | 1.11 | 0.11 | 0.11 |
| R183P | 9143.00 | 8148.29 | 1.12 | 0.99 | 0.96 |
| R183K | 9843.98 | 8685.25 | 1.13 | 1.07 | 1.02 |
| R183W | 8144.07 | 7669.02 | 1.06 | 0.88 | 0.90 |
| R183E | 9873.25 | 8403.44 | 1.17 | 1.07 | 0.99 |
| R183A | 9386.14 | 8368.29 | 1.12 | 1.02 | 0.99 |
| R183T | 4841.94 | 8385.09 | 0.58 | 0.52 | 0.99 |
| R183L | 517.07 | 532.72 | 0.97 | 0.06 | 0.06 |
| R183N | 10062.02 | 8456.13 | 1.19 | 1.09 | 1.00 |
| R183H | 9434.01 | 8295.55 | 1.14 | 1.02 | 0.98 |
| R183V | 9252.08 | 7954.42 | 1.16 | 1.00 | 0.94 |
| R183C | 6603.93 | 6597.30 | 1.00 | 0.72 | 0.78 |
| R183M | 9679.52 | 8250.27 | 1.17 | 1.05 | 0.97 |
| R183I | 495.34 | 8009.63 | 0.06 | 0.05 | 0.94 |
| R183G | 7326.36 | 6021.39 | 1.22 | 1.28 | 1.19 |
| R183S | 7896.17 | 6240.74 | 1.27 | 1.38 | 1.23 |
| W184G | 430.62 | 391.79 | 1.10 | 0.05 | 0.05 |
| W184H | 440.24 | 428.35 | 1.03 | 0.05 | 0.05 |
| W184L | 476.77 | 428.90 | 1.11 | 0.06 | 0.05 |
| W184E | 463.88 | 438.97 | 1.06 | 0.05 | 0.05 |
| W184P | 437.57 | 387.71 | 1.13 | 0.05 | 0.05 |
| W184N | 467.91 | 468.52 | 1.00 | 0.06 | 0.06 |
| W184A | 452.63 | 451.66 | 1.00 | 0.05 | 0.06 |
| W184T | 421.08 | 419.51 | 1.00 | 0.05 | 0.05 |
| W184R | 457.42 | 390.02 | 1.17 | 0.05 | 0.05 |
| W184Q | 450.92 | 448.33 | 1.01 | 0.05 | 0.05 |
| W184V | 454.60 | 407.30 | 1.12 | 0.05 | 0.05 |
| W184S | 486.70 | 485.16 | 1.00 | 0.06 | 0.06 |
| W184M | 447.30 | 395.61 | 1.13 | 0.05 | 0.05 |
| W184I | 478.17 | 503.24 | 0.95 | 0.06 | 0.06 |
| W184F | 455.86 | 427.51 | 1.07 | 0.05 | 0.05 |
| T185R | 1728.04 | 851.07 | 2.03 | 0.20 | 0.10 |
| T185Y | 937.75 | 540.66 | 1.73 | 0.11 | 0.07 |
| T185W | 577.54 | 501.10 | 1.15 | 0.07 | 0.06 |
| T185H | 1448.04 | 783.89 | 1.85 | 0.17 | 0.10 |
| T185G | 3922.30 | 1990.15 | 1.97 | 0.46 | 0.24 |
| T185P | 1773.27 | 1542.44 | 1.15 | 0.21 | 0.19 |
| T185S | 9554.77 | 8267.62 | 1.16 | 1.12 | 1.01 |
| T185V | 1648.14 | 897.66 | 1.84 | 0.19 | 0.11 |
| T185Q | 1594.81 | 583.93 | 2.73 | 0.19 | 0.07 |
| T185N | 790.61 | 546.44 | 1.45 | 0.09 | 0.07 |
| T185C | 1554.42 | 1248.58 | 1.24 | 0.18 | 0.15 |
| T185L | 483.25 | 463.52 | 1.04 | 0.06 | 0.06 |
| T185A | 1599.64 | 711.08 | 2.25 | 0.19 | 0.09 |
| T185E | 1324.02 | 703.76 | 1.88 | 0.16 | 0.09 |
| T185D | 485.86 | 418.67 | 1.16 | 0.06 | 0.06 |
| N186G | 7592.31 | 6944.43 | 1.09 | 0.89 | 0.85 |
| N186A | 7466.07 | 7519.13 | 0.99 | 0.88 | 0.92 |
| N186T | 8897.05 | 8063.02 | 1.10 | 1.05 | 0.98 |
| N186R | 3212.69 | 3085.21 | 1.04 | 0.38 | 0.38 |
| N186L | 8097.42 | 7286.32 | 1.11 | 0.95 | 0.89 |
| N186P | 2173.37 | 1948.86 | 1.12 | 0.26 | 0.24 |
| N186S | 6854.56 | 6735.79 | 1.02 | 0.81 | 0.82 |
| N186V | 6303.91 | 6575.96 | 0.96 | 0.74 | 0.80 |
| N186Q | 4834.56 | 4621.18 | 1.05 | 0.57 | 0.56 |
| N186H | 3390.53 | 3309.97 | 1.02 | 0.40 | 0.40 |
| N186C | 3139.47 | 3113.35 | 1.01 | 0.37 | 0.38 |
| N186E | 3801.36 | 3332.52 | 1.14 | 0.45 | 0.41 |
| N186F | 3794.65 | 3316.48 | 1.14 | 0.45 | 0.40 |
| N186Y | 6301.09 | 7570.59 | 0.83 | 0.74 | 0.92 |
| N186D | 6853.09 | 6333.37 | 1.08 | 0.81 | 0.77 |
| N187R | 1042.36 | 709.74 | 1.47 | 0.12 | 0.09 |
| N187M | 1731.67 | 995.07 | 1.74 | 0.20 | 0.12 |
| N187S | 9538.59 | 8971.12 | 1.06 | 1.12 | 1.10 |
| N187T | 9856.38 | 8855.58 | 1.11 | 1.16 | 1.08 |
| N187L | 505.93 | 464.62 | 1.09 | 0.06 | 0.06 |
| N187W | 1694.86 | 1425.68 | 1.19 | 0.20 | 0.17 |
| N187F | 1240.41 | 731.98 | 1.69 | 0.15 | 0.09 |
| N187K | 2331.93 | 1140.19 | 2.05 | 0.27 | 0.14 |
| N187I | 1444.98 | 683.03 | 2.12 | 0.17 | 0.08 |
| N187A | 4379.80 | 2616.49 | 1.67 | 0.52 | 0.32 |
| N187P | 644.27 | 572.98 | 1.12 | 0.08 | 0.07 |
| N187D | 9843.65 | 8801.57 | 1.12 | 1.16 | 1.07 |
| N187G | 535.06 | 514.10 | 1.04 | 0.07 | 0.07 |
| N187C | 1804.28 | 1860.67 | 0.97 | 0.23 | 0.25 |
| N187H | 1143.07 | 1071.67 | 1.07 | 0.14 | 0.14 |
| F188P | 10012.21 | 8943.91 | 1.12 | 1.18 | 1.09 |
| F188I | 7342.21 | 6782.40 | 1.08 | 0.86 | 0.83 |
| F188N | 10024.22 | 8961.63 | 1.12 | 1.18 | 1.09 |
| F188S | 9564.51 | 8841.98 | 1.08 | 1.13 | 1.08 |
| F188Q | 9591.39 | 8664.63 | 1.11 | 1.13 | 1.06 |
| F188K | 8347.12 | 7497.38 | 1.11 | 0.98 | 0.92 |
| F188G | 9891.61 | 9065.43 | 1.09 | 1.16 | 1.11 |
| F188W | 9389.97 | 8774.36 | 1.07 | 1.10 | 1.07 |
| F188E | 10235.38 | 8984.46 | 1.14 | 1.20 | 1.10 |
| F188H | 2065.12 | 1901.41 | 1.09 | 0.24 | 0.23 |
| F188D | 10087.61 | 8889.75 | 1.13 | 1.19 | 1.09 |
| F188A | 1502.70 | 1231.99 | 1.22 | 0.18 | 0.15 |
| F188L | 8309.64 | 7501.30 | 1.11 | 0.98 | 0.92 |
| F188R | 8182.64 | 7750.05 | 1.06 | 0.96 | 0.95 |
| F188V | 7116.29 | 5860.00 | 1.21 | 1.24 | 1.16 |
| R189L | 9236.08 | 8947.54 | 1.03 | 1.09 | 1.09 |
| R189G | 10307.88 | 9096.35 | 1.13 | 1.21 | 1.11 |
| R189K | 9365.15 | 9033.15 | 1.04 | 1.10 | 1.10 |
| R189P | 3200.68 | 3533.96 | 0.91 | 0.38 | 0.43 |
| R189E | 9552.57 | 8789.28 | 1.09 | 1.12 | 1.07 |
| R189V | 9150.17 | 8088.39 | 1.13 | 1.08 | 0.99 |
| R189D | 9506.16 | 8933.41 | 1.06 | 1.12 | 1.09 |
| R189Y | 9893.14 | 8946.52 | 1.11 | 1.16 | 1.09 |
| R189C | 5318.06 | 5457.78 | 0.97 | 0.63 | 0.67 |
| R189A | 9718.09 | 8798.13 | 1.10 | 1.14 | 1.07 |
| R189H | 1360.90 | 1350.33 | 1.01 | 0.16 | 0.16 |
| R189W | 7657.12 | 7070.92 | 1.08 | 0.90 | 0.86 |
| R189N | 7842.39 | 6675.36 | 1.17 | 1.37 | 1.32 |
| R189T | 7610.10 | 6459.94 | 1.18 | 1.33 | 1.27 |
| R189Q | 7465.37 | 6396.79 | 1.17 | 1.30 | 1.26 |
| E190A | 1510.06 | 2116.94 | 0.71 | 0.21 | 0.23 |
| E190H | 6276.13 | 7564.04 | 0.83 | 0.88 | 0.83 |
| E190V | 643.37 | 1658.11 | 0.39 | 0.09 | 0.18 |
| E190P | 2420.68 | 1767.43 | 1.37 | 0.34 | 0.19 |
| E190C | 1827.25 | 2083.88 | 0.88 | 0.26 | 0.23 |
| E190G | 5313.99 | 4365.93 | 1.22 | 0.75 | 0.48 |
| E190R | 1185.26 | 1810.53 | 0.65 | 0.17 | 0.20 |
| E190I | 1880.80 | 2886.28 | 0.65 | 0.27 | 0.32 |
| E190S | 4542.61 | 5987.33 | 0.76 | 0.64 | 0.66 |
| E190T | 2293.47 | 4444.68 | 0.52 | 0.32 | 0.49 |
| E190M | 2557.21 | 1317.73 | 1.94 | 0.36 | 0.15 |
| E190L | 2542.38 | 2986.91 | 0.85 | 0.36 | 0.33 |
| E190K | 2960.37 | 4343.12 | 0.68 | 0.42 | 0.48 |
| E190Y | 7243.54 | 5742.33 | 1.26 | 1.27 | 1.13 |
| E190D | 7910.21 | 6468.78 | 1.22 | 1.38 | 1.28 |
| Y191T | 611.75 | 535.95 | 1.14 | 0.07 | 0.06 |
| Y191H | 2333.85 | 2191.64 | 1.06 | 0.28 | 0.24 |
| Y191G | 428.17 | 432.65 | 0.99 | 0.05 | 0.05 |
| Y191L | 379.02 | 357.82 | 1.06 | 0.05 | 0.04 |
| Y191P | 1359.30 | 1046.33 | 1.30 | 0.16 | 0.12 |
| Y191Q | 451.92 | 403.46 | 1.12 | 0.05 | 0.05 |
| Y191K | 464.62 | 406.52 | 1.14 | 0.06 | 0.05 |
| Y191D | 392.24 | 370.67 | 1.06 | 0.05 | 0.04 |
| Y191A | 452.13 | 418.53 | 1.08 | 0.05 | 0.05 |
| Y191W | 395.63 | 411.91 | 0.96 | 0.05 | 0.05 |
| Y191S | 530.80 | 447.13 | 1.19 | 0.06 | 0.05 |
| Y191V | 1553.58 | 1254.11 | 1.24 | 0.19 | 0.14 |
| Y191E | 395.04 | 407.49 | 0.97 | 0.05 | 0.05 |
| Y191R | 652.95 | 725.68 | 0.90 | 0.08 | 0.08 |
| Y191C | 530.42 | 463.90 | 1.14 | 0.06 | 0.05 |
| N192R | 640.72 | 482.61 | 1.33 | 0.09 | 0.05 |
| N192L | 591.92 | 571.56 | 1.04 | 0.08 | 0.06 |
| N192Q | 1089.41 | 1020.23 | 1.07 | 0.15 | 0.11 |
| N192P | 685.62 | 856.11 | 0.80 | 0.10 | 0.09 |
| N192H | 2274.24 | 1058.80 | 2.15 | 0.32 | 0.12 |
| N192S | 2043.65 | 1630.74 | 1.25 | 0.29 | 0.18 |
| N192W | 548.30 | 538.86 | 1.02 | 0.08 | 0.06 |
| N192G | 899.47 | 659.29 | 1.36 | 0.13 | 0.07 |
| N192D | 4213.33 | 2216.40 | 1.90 | 0.59 | 0.24 |
| N192V | 588.02 | 537.64 | 1.09 | 0.08 | 0.06 |
| N192A | 574.26 | 543.66 | 1.06 | 0.08 | 0.06 |
| N192T | 536.50 | 576.21 | 0.93 | 0.08 | 0.06 |
| N192K | 685.26 | 633.89 | 1.08 | 0.10 | 0.07 |
| N192C | 1310.46 | 987.31 | 1.33 | 0.18 | 0.11 |
| N192M | 547.98 | 537.29 | 1.02 | 0.08 | 0.06 |
| L193P | 388.57 | 381.15 | 1.02 | 0.05 | 0.04 |
| L193G | 437.84 | 478.44 | 0.92 | 0.05 | 0.05 |
| L193F | 481.49 | 491.33 | 0.98 | 0.06 | 0.05 |
| L193S | 448.35 | 449.03 | 1.00 | 0.05 | 0.05 |
| L193W | 481.79 | 460.74 | 1.05 | 0.06 | 0.05 |
| L193A | 510.96 | 468.83 | 1.09 | 0.06 | 0.05 |
| L193R | 481.08 | 477.55 | 1.01 | 0.06 | 0.05 |
| L193Q | 417.53 | 412.01 | 1.01 | 0.05 | 0.05 |
| L193E | 401.70 | 409.23 | 0.98 | 0.05 | 0.05 |
| L193K | 417.39 | 426.26 | 0.98 | 0.05 | 0.05 |
| L193N | 432.35 | 434.95 | 0.99 | 0.05 | 0.05 |
| L193I | 2767.03 | 3467.03 | 0.80 | 0.33 | 0.39 |
| L193T | 679.48 | 638.88 | 1.06 | 0.08 | 0.07 |
| L193D | 419.37 | 424.41 | 0.99 | 0.05 | 0.05 |
| L193Y | 3022.00 | 2706.28 | 1.12 | 0.36 | 0.30 |
| H194S | 5518.27 | 6112.38 | 0.90 | 0.78 | 0.67 |
| H194E | 7667.53 | 8295.22 | 0.92 | 1.08 | 0.91 |
| H194K | 5130.62 | 6124.27 | 0.84 | 0.72 | 0.67 |
| H194Q | 6399.62 | 7113.56 | 0.90 | 0.90 | 0.78 |
| H194V | 1611.06 | 5696.43 | 0.28 | 0.23 | 0.63 |
| H194T | 3884.64 | 2598.12 | 1.50 | 0.55 | 0.29 |
| H194L | 5710.11 | 6872.56 | 0.83 | 0.80 | 0.76 |
| H194Y | 4922.31 | 5688.29 | 0.87 | 0.69 | 0.63 |
| H194F | 3787.65 | 5388.18 | 0.70 | 0.53 | 0.59 |
| H194G | 4636.22 | 5437.23 | 0.85 | 0.65 | 0.60 |
| H194I | 2901.13 | 3777.68 | 0.77 | 0.41 | 0.42 |
| H194W | 5434.60 | 7448.23 | 0.73 | 0.77 | 0.82 |
| H194M | 2941.85 | 9057.43 | 0.32 | 0.41 | 1.00 |
| H194A | 4681.45 | 2746.90 | 1.70 | 0.66 | 0.30 |
| H194P | 5264.79 | 5058.19 | 1.04 | 0.74 | 0.56 |
| R195C | 4231.32 | 1853.20 | 2.28 | 0.60 | 0.20 |
| R195F | 687.70 | 720.42 | 0.95 | 0.10 | 0.08 |
| R195W | 5099.23 | 4524.84 | 1.13 | 0.72 | 0.50 |
| R195T | 1101.98 | 1175.85 | 0.94 | 0.16 | 0.13 |
| R195L | 5073.57 | 4520.73 | 1.12 | 0.72 | 0.50 |
| R195G | 5269.21 | 3025.93 | 1.74 | 0.74 | 0.33 |
| R195Q | 1958.69 | 1361.83 | 1.44 | 0.28 | 0.15 |
| R195K | 3839.86 | 7080.78 | 0.54 | 0.54 | 0.78 |
| R195S | 642.14 | 649.21 | 0.99 | 0.09 | 0.07 |
| R195A | 5605.90 | 3852.81 | 1.46 | 0.79 | 0.42 |
| R195D | 2724.53 | 1907.81 | 1.43 | 0.38 | 0.21 |
| R195P | 571.50 | 615.21 | 0.93 | 0.08 | 0.07 |
| R195Y | 763.31 | 794.42 | 0.96 | 0.11 | 0.09 |
| R195E | 7597.55 | 8468.35 | 0.90 | 1.07 | 0.93 |
| R195V | 1711.48 | 1037.62 | 1.65 | 0.24 | 0.11 |
| V196T | 1040.90 | 1268.04 | 0.82 | 0.12 | 0.14 |
| V196D | 443.04 | 446.39 | 0.99 | 0.05 | 0.05 |
| V196G | 490.83 | 494.67 | 0.99 | 0.06 | 0.06 |
| V196E | 488.55 | 489.74 | 1.00 | 0.06 | 0.05 |
| V196A | 452.36 | 452.12 | 1.00 | 0.05 | 0.05 |
| V196S | 1186.52 | 949.52 | 1.25 | 0.14 | 0.11 |
| V196Q | 412.17 | 430.91 | 0.96 | 0.05 | 0.05 |
| V196P | 576.83 | 620.88 | 0.93 | 0.07 | 0.07 |
| V196R | 493.29 | 474.38 | 1.04 | 0.06 | 0.05 |
| V196H | 465.64 | 479.66 | 0.97 | 0.06 | 0.05 |
| V196Y | 462.28 | 474.94 | 0.97 | 0.06 | 0.05 |
| V196I | 1125.67 | 1229.87 | 0.92 | 0.13 | 0.14 |
| V196L | 464.80 | 491.01 | 0.95 | 0.06 | 0.05 |
| V196K | 455.84 | 482.44 | 0.94 | 0.05 | 0.05 |
| V196M | 479.36 | 518.00 | 0.93 | 0.06 | 0.06 |
| A197G | 1238.39 | 2552.91 | 0.49 | 0.17 | 0.28 |
| A197S | 3959.39 | 2633.91 | 1.50 | 0.56 | 0.29 |
| A197L | 1013.13 | 809.32 | 1.25 | 0.14 | 0.09 |
| A197P | 857.06 | 933.29 | 0.92 | 0.12 | 0.10 |
| A197V | 2549.12 | 4355.70 | 0.59 | 0.36 | 0.48 |
| A197Y | 650.21 | 722.49 | 0.90 | 0.09 | 0.08 |
| A197Q | 658.64 | 652.52 | 1.01 | 0.09 | 0.07 |
| A197R | 635.08 | 640.91 | 0.99 | 0.09 | 0.07 |
| A197T | 1933.94 | 4482.59 | 0.43 | 0.27 | 0.49 |
| A197I | 1440.69 | 1060.51 | 1.36 | 0.20 | 0.12 |
| A197H | 604.11 | 638.63 | 0.95 | 0.09 | 0.07 |
| A197E | 686.96 | 624.22 | 1.10 | 0.10 | 0.07 |
| A197W | 1448.83 | 2588.64 | 0.56 | 0.20 | 0.29 |
| A197N | 623.17 | 840.56 | 0.74 | 0.09 | 0.09 |
| A197C | 4012.80 | 3140.52 | 1.28 | 0.70 | 0.62 |
| A198T | 761.19 | 700.22 | 1.09 | 0.11 | 0.08 |
| A198K | 490.20 | 1179.92 | 0.42 | 0.07 | 0.13 |
| A198S | 4061.28 | 3136.65 | 1.29 | 0.57 | 0.35 |
| A198H | 581.41 | 575.73 | 1.01 | 0.08 | 0.06 |
| A198G | 2610.82 | 2368.26 | 1.10 | 0.37 | 0.26 |
| A198E | 485.45 | 662.62 | 0.73 | 0.07 | 0.07 |
| A198P | 656.48 | 580.71 | 1.13 | 0.09 | 0.06 |
| A198L | 1339.94 | 726.74 | 1.84 | 0.19 | 0.08 |
| A198R | 570.33 | 565.56 | 1.01 | 0.08 | 0.06 |
| A198V | 3026.36 | 7305.85 | 0.41 | 0.43 | 0.80 |
| A198M | 1384.46 | 999.55 | 1.39 | 0.20 | 0.11 |
| A198F | 572.48 | 559.57 | 1.02 | 0.08 | 0.06 |
| A198W | 560.48 | 547.72 | 1.02 | 0.08 | 0.06 |
| A198Y | 486.57 | 612.28 | 0.79 | 0.07 | 0.07 |
| A198D | 633.49 | 474.50 | 1.34 | 0.09 | 0.05 |
| H199I | 520.35 | 496.48 | 1.05 | 0.08 | 0.07 |
| H199P | 437.57 | 404.21 | 1.08 | 0.07 | 0.05 |
| H199G | 436.53 | 392.94 | 1.11 | 0.07 | 0.05 |
| H199N | 420.26 | 375.18 | 1.12 | 0.07 | 0.05 |
| H199S | 411.09 | 377.36 | 1.09 | 0.06 | 0.05 |
| H199L | 531.61 | 530.53 | 1.00 | 0.08 | 0.07 |
| H199M | 413.37 | 384.23 | 1.08 | 0.07 | 0.05 |
| H199A | 391.56 | 381.36 | 1.03 | 0.06 | 0.05 |
| H199C | 404.49 | 366.35 | 1.10 | 0.06 | 0.05 |
| H199K | 402.34 | 383.95 | 1.05 | 0.06 | 0.05 |
| H199R | 422.19 | 387.94 | 1.09 | 0.07 | 0.05 |
| H199V | 421.16 | 378.71 | 1.11 | 0.07 | 0.05 |
| H199W | 377.01 | 345.02 | 1.09 | 0.06 | 0.05 |
| H199T | 399.21 | 382.65 | 1.04 | 0.06 | 0.05 |
| H199E | 399.49 | 385.83 | 1.04 | 0.06 | 0.05 |
| E200P | 414.11 | 409.55 | 1.01 | 0.07 | 0.06 |
| E200G | 440.94 | 402.85 | 1.09 | 0.07 | 0.05 |
| E200A | 448.41 | 413.61 | 1.08 | 0.07 | 0.06 |
| E200T | 461.19 | 418.51 | 1.10 | 0.07 | 0.06 |
| E200I | 457.88 | 419.19 | 1.09 | 0.07 | 0.06 |
| E200W | 418.40 | 403.05 | 1.04 | 0.07 | 0.05 |
| E200R | 449.83 | 425.86 | 1.06 | 0.07 | 0.06 |
| E200F | 446.49 | 417.58 | 1.07 | 0.07 | 0.06 |
| E200M | 448.32 | 428.16 | 1.05 | 0.07 | 0.06 |
| E200D | 428.91 | 401.64 | 1.07 | 0.07 | 0.05 |
| E200V | 426.45 | 407.13 | 1.05 | 0.07 | 0.06 |
| E200C | 413.11 | 384.79 | 1.07 | 0.07 | 0.05 |
| E200S | 422.57 | 391.02 | 1.08 | 0.07 | 0.05 |
| E200Y | 412.07 | 393.97 | 1.05 | 0.07 | 0.05 |
| E200N | 430.94 | 412.07 | 1.05 | 0.07 | 0.06 |
| L201A | 754.66 | 957.77 | 0.79 | 0.12 | 0.13 |
| L201R | 442.35 | 442.57 | 1.00 | 0.07 | 0.06 |
| L201E | 464.22 | 443.89 | 1.05 | 0.07 | 0.06 |
| L201P | 494.97 | 471.92 | 1.05 | 0.08 | 0.06 |
| L201G | 574.82 | 590.26 | 0.97 | 0.09 | 0.08 |
| L201V | 3359.21 | 4623.67 | 0.73 | 0.53 | 0.62 |
| L201T | 1509.22 | 2175.97 | 0.69 | 0.24 | 0.29 |
| L201I | 2861.66 | 2231.87 | 1.28 | 0.45 | 0.30 |
| L201S | 859.79 | 964.65 | 0.89 | 0.14 | 0.13 |
| L201W | 1258.36 | 1335.56 | 0.94 | 0.20 | 0.18 |
| L201Q | 657.51 | 749.98 | 0.88 | 0.10 | 0.10 |
| L201D | 486.09 | 471.81 | 1.03 | 0.08 | 0.06 |
| L201M | 5637.84 | 7147.36 | 0.79 | 0.89 | 0.97 |
| L201K | 484.89 | 467.23 | 1.04 | 0.08 | 0.06 |
| L201N | 440.03 | 432.42 | 1.02 | 0.07 | 0.06 |
| G202T | 556.53 | 546.05 | 1.02 | 0.09 | 0.07 |
| G202Y | 533.64 | 530.73 | 1.01 | 0.08 | 0.07 |
| G202E | 558.69 | 543.68 | 1.03 | 0.09 | 0.07 |
| G202V | 569.22 | 572.58 | 0.99 | 0.09 | 0.08 |
| G202S | 512.82 | 503.35 | 1.02 | 0.08 | 0.07 |
| G202L | 513.71 | 508.34 | 1.01 | 0.08 | 0.07 |
| G202I | 535.96 | 516.37 | 1.04 | 0.08 | 0.07 |
| G202M | 507.94 | 500.04 | 1.02 | 0.08 | 0.07 |
| G202H | 567.88 | 547.25 | 1.04 | 0.09 | 0.07 |
| G202C | 508.19 | 499.05 | 1.02 | 0.08 | 0.07 |
| G202R | 537.10 | 511.28 | 1.05 | 0.08 | 0.07 |
| G202P | 544.39 | 535.24 | 1.02 | 0.09 | 0.07 |
| G202A | 580.75 | 571.95 | 1.02 | 0.09 | 0.08 |
| G202K | 531.07 | 520.45 | 1.02 | 0.08 | 0.07 |
| G202D | 559.64 | 544.50 | 1.03 | 0.09 | 0.07 |
| H203Y | 910.26 | 1218.02 | 0.75 | 0.14 | 0.16 |
| H203E | 7284.23 | 7937.91 | 0.92 | 1.15 | 1.07 |
| H203R | 545.70 | 545.36 | 1.00 | 0.09 | 0.07 |
| H203Q | 570.55 | 541.42 | 1.05 | 0.09 | 0.07 |
| H203P | 547.00 | 527.67 | 1.04 | 0.09 | 0.07 |
| H203G | 558.88 | 576.91 | 0.97 | 0.09 | 0.08 |
| H203T | 534.16 | 535.33 | 1.00 | 0.08 | 0.07 |
| H203D | 542.85 | 530.31 | 1.02 | 0.09 | 0.07 |
| H203L | 1224.67 | 1746.14 | 0.70 | 0.19 | 0.24 |
| H203N | 547.92 | 532.11 | 1.03 | 0.09 | 0.07 |
| H203A | 513.18 | 515.49 | 1.00 | 0.08 | 0.07 |
| H203S | 534.50 | 507.56 | 1.05 | 0.08 | 0.07 |
| H203V | 565.64 | 554.43 | 1.02 | 0.09 | 0.07 |
| H203I | 568.56 | 613.73 | 0.93 | 0.09 | 0.08 |
| H203C | 504.41 | 522.69 | 0.97 | 0.08 | 0.07 |
| S204R | 557.42 | 544.69 | 1.02 | 0.09 | 0.07 |
| S204N | 733.30 | 754.34 | 0.97 | 0.12 | 0.10 |
| S204A | 3654.83 | 3972.28 | 0.92 | 0.58 | 0.54 |
| S204T | 1697.49 | 3586.11 | 0.47 | 0.27 | 0.48 |
| S204Y | 550.01 | 538.07 | 1.02 | 0.09 | 0.07 |
| S204V | 3063.02 | 1827.71 | 1.68 | 0.48 | 0.25 |
| S204L | 501.10 | 594.44 | 0.84 | 0.08 | 0.08 |
| S204H | 486.78 | 508.13 | 0.96 | 0.08 | 0.07 |
| S204D | 507.05 | 489.81 | 1.04 | 0.08 | 0.07 |
| S204Q | 530.67 | 472.92 | 1.12 | 0.08 | 0.06 |
| S204G | 1483.41 | 1333.79 | 1.11 | 0.23 | 0.18 |
| S204W | 487.01 | 504.11 | 0.97 | 0.08 | 0.07 |
| S204I | 634.82 | 516.30 | 1.23 | 0.10 | 0.07 |
| S204K | 484.92 | 471.83 | 1.03 | 0.08 | 0.06 |
| S204P | 483.87 | 506.90 | 0.95 | 0.08 | 0.07 |
| L205T | 1304.89 | 1099.25 | 1.19 | 0.13 | 0.12 |
| L205D | 774.29 | 830.37 | 0.93 | 0.08 | 0.09 |
| L205S | 686.11 | 601.35 | 1.14 | 0.07 | 0.07 |
| L205G | 792.45 | 790.93 | 1.00 | 0.08 | 0.09 |
| L205P | 592.15 | 673.32 | 0.88 | 0.06 | 0.07 |
| L205E | 473.89 | 446.64 | 1.06 | 0.05 | 0.05 |
| L205V | 5589.64 | 7308.12 | 0.76 | 0.57 | 0.80 |
| L205M | 8334.85 | 8229.20 | 1.01 | 0.85 | 0.90 |
| L205N | 1426.11 | 1322.80 | 1.08 | 0.15 | 0.15 |
| L205C | 1903.14 | 2394.15 | 0.79 | 0.20 | 0.26 |
| L205I | 5644.28 | 7817.06 | 0.72 | 0.58 | 0.86 |
| L205A | 1796.22 | 1704.85 | 1.05 | 0.18 | 0.19 |
| L205R | 508.62 | 575.22 | 0.88 | 0.05 | 0.06 |
| L205W | 497.92 | 427.60 | 1.16 | 0.05 | 0.05 |
| L205Q | 2191.83 | 2399.54 | 0.91 | 0.22 | 0.26 |
| G206I | 467.21 | 460.72 | 1.01 | 0.05 | 0.05 |
| G206V | 619.10 | 682.58 | 0.91 | 0.06 | 0.07 |
| G206A | 4554.61 | 2702.11 | 1.69 | 0.47 | 0.30 |
| G206C | 491.44 | 469.90 | 1.05 | 0.05 | 0.05 |
| G206S | 1226.37 | 919.66 | 1.33 | 0.13 | 0.10 |
| G206P | 503.21 | 497.87 | 1.01 | 0.05 | 0.05 |
| G206L | 499.74 | 469.53 | 1.06 | 0.05 | 0.05 |
| G206D | 490.08 | 451.61 | 1.09 | 0.05 | 0.05 |
| G206M | 478.55 | 451.47 | 1.06 | 0.05 | 0.05 |
| G206R | 677.07 | 831.95 | 0.81 | 0.07 | 0.09 |
| G206Q | 805.32 | 851.38 | 0.95 | 0.08 | 0.09 |
| G206E | 469.86 | 447.60 | 1.05 | 0.05 | 0.05 |
| G206H | 463.25 | 437.73 | 1.06 | 0.05 | 0.05 |
| G206T | 475.20 | 491.10 | 0.97 | 0.05 | 0.05 |
| G206W | 472.91 | 437.66 | 1.08 | 0.05 | 0.05 |
| L207S | 657.07 | 501.03 | 1.31 | 0.07 | 0.05 |
| L207Y | 1032.96 | 1142.52 | 0.90 | 0.11 | 0.13 |
| L207A | 6302.90 | 5614.64 | 1.12 | 0.65 | 0.62 |
| L207R | 3476.88 | 1332.44 | 2.61 | 0.36 | 0.15 |
| L207P | 528.87 | 508.95 | 1.04 | 0.05 | 0.06 |
| L207Q | 671.72 | 518.36 | 1.30 | 0.07 | 0.06 |
| L207N | 551.03 | 476.05 | 1.16 | 0.06 | 0.05 |
| L207K | 860.90 | 594.92 | 1.45 | 0.09 | 0.07 |
| L207M | 11903.05 | 12984.69 | 0.92 | 1.22 | 1.42 |
| L207W | 509.40 | 470.26 | 1.08 | 0.05 | 0.05 |
| L207H | 620.20 | 595.55 | 1.04 | 0.06 | 0.07 |
| L207D | 523.82 | 473.80 | 1.11 | 0.05 | 0.05 |
| L207V | 656.95 | 550.54 | 1.19 | 0.08 | 0.07 |
| L207I | 645.37 | 550.32 | 1.17 | 0.08 | 0.07 |
| L207G | 610.01 | 484.35 | 1.26 | 0.08 | 0.06 |
| S208D | 10064.82 | 9325.26 | 1.08 | 1.03 | 1.02 |
| S208V | 10469.49 | 9334.16 | 1.12 | 1.07 | 1.02 |
| S208P | 9922.26 | 9236.91 | 1.07 | 1.02 | 1.01 |
| S208G | 10452.64 | 9295.93 | 1.12 | 1.07 | 1.02 |
| S208A | 10553.22 | 9517.15 | 1.11 | 1.08 | 1.04 |
| S208K | 22659.58 | 19984.18 | 1.13 | 2.32 | 2.19 |
| S208N | 9993.85 | 9327.07 | 1.07 | 1.02 | 1.02 |
| S208F | 8826.28 | 9040.21 | 0.98 | 0.91 | 0.99 |
| S208Q | 10196.89 | 9183.58 | 1.11 | 1.05 | 1.01 |
| S208W | 9229.04 | 9226.75 | 1.00 | 0.95 | 1.01 |
| S208T | 9241.73 | 8912.77 | 1.04 | 0.95 | 0.98 |
| S208E | 10198.81 | 9401.75 | 1.08 | 1.05 | 1.03 |
| S208C | 10497.72 | 16287.64 | 0.64 | 1.08 | 1.79 |
| S208R | 7639.06 | 6465.10 | 1.18 | 1.34 | 1.28 |
| S208L | 7811.78 | 6354.14 | 1.23 | 1.37 | 1.25 |
| H209T | 466.30 | 415.72 | 1.12 | 0.11 | 0.08 |
| H209Y | 471.70 | 455.15 | 1.04 | 0.11 | 0.09 |
| H209R | 489.49 | 463.09 | 1.06 | 0.12 | 0.09 |
| H209Q | 513.42 | 476.96 | 1.08 | 0.12 | 0.09 |
| H209A | 511.91 | 469.64 | 1.09 | 0.12 | 0.09 |
| H209G | 495.58 | 466.25 | 1.06 | 0.12 | 0.09 |
| H209N | 455.09 | 424.90 | 1.07 | 0.11 | 0.08 |
| H209P | 526.85 | 480.73 | 1.10 | 0.13 | 0.09 |
| H209W | 516.05 | 484.16 | 1.07 | 0.12 | 0.09 |
| H209V | 499.35 | 465.99 | 1.07 | 0.12 | 0.09 |
| H209D | 479.48 | 442.06 | 1.08 | 0.12 | 0.09 |
| H209S | 490.77 | 438.98 | 1.12 | 0.12 | 0.09 |
| H209F | 490.42 | 437.68 | 1.12 | 0.12 | 0.09 |
| H209L | 491.46 | 441.89 | 1.11 | 0.12 | 0.09 |
| H209C | 471.56 | 420.60 | 1.12 | 0.11 | 0.08 |
| S210C | 634.06 | 565.38 | 1.12 | 0.15 | 0.11 |
| S210G | 643.08 | 581.11 | 1.11 | 0.16 | 0.11 |
| S210I | 778.38 | 625.00 | 1.25 | 0.19 | 0.12 |
| S210R | 644.74 | 565.67 | 1.14 | 0.16 | 0.11 |
| S210L | 737.60 | 623.25 | 1.18 | 0.18 | 0.12 |
| S210V | 1190.35 | 856.63 | 1.39 | 0.29 | 0.17 |
| S210H | 605.43 | 521.90 | 1.16 | 0.15 | 0.10 |
| S210N | 615.29 | 556.38 | 1.11 | 0.15 | 0.11 |
| S210F | 529.93 | 487.42 | 1.09 | 0.13 | 0.09 |
| S210P | 544.94 | 513.59 | 1.06 | 0.13 | 0.10 |
| S210W | 527.32 | 486.97 | 1.08 | 0.13 | 0.09 |
| S210Q | 593.74 | 548.93 | 1.08 | 0.14 | 0.11 |
| S210T | 2977.61 | 3427.71 | 0.87 | 0.72 | 0.67 |
| S210K | 625.14 | 573.41 | 1.09 | 0.15 | 0.11 |
| S210A | 1682.05 | 1546.97 | 1.09 | 0.25 | 0.21 |
| T211P | 3493.13 | 3774.82 | 0.93 | 0.84 | 0.73 |
| T211R | 4636.24 | 5429.67 | 0.85 | 1.12 | 1.05 |
| T211K | 4457.25 | 5411.31 | 0.82 | 1.08 | 1.05 |
| T211G | 3443.93 | 3543.72 | 0.97 | 0.83 | 0.69 |
| T211M | 3806.80 | 4871.37 | 0.78 | 0.92 | 0.95 |
| T211N | 5924.95 | 6170.25 | 0.96 | 1.43 | 1.20 |
| T211V | 5095.76 | 5335.63 | 0.96 | 1.23 | 1.04 |
| T211H | 1885.69 | 1829.82 | 1.03 | 0.46 | 0.36 |
| T211Q | 4868.86 | 5772.70 | 0.84 | 1.18 | 1.12 |
| T211S | 4641.02 | 4565.80 | 1.02 | 1.12 | 0.89 |
| T211A | 2696.88 | 2830.43 | 0.95 | 0.65 | 0.55 |
| T211F | 1412.47 | 1277.53 | 1.11 | 0.34 | 0.25 |
| T211D | 2442.24 | 2154.48 | 1.13 | 0.59 | 0.42 |
| T211W | 1362.99 | 1207.40 | 1.13 | 0.33 | 0.23 |
| T211L | 2376.23 | 2102.07 | 1.13 | 0.35 | 0.28 |
| D212E | 4877.68 | 4473.75 | 1.09 | 1.18 | 0.87 |
| D212A | 2710.82 | 2417.65 | 1.12 | 0.66 | 0.47 |
| D212K | 2296.16 | 2049.97 | 1.12 | 0.55 | 0.40 |
| D212R | 2273.87 | 2004.06 | 1.13 | 0.55 | 0.39 |
| D212T | 2923.39 | 2699.75 | 1.08 | 0.71 | 0.52 |
| D212N | 4575.59 | 5229.75 | 0.87 | 1.11 | 1.02 |
| D212G | 1011.62 | 657.28 | 1.54 | 0.24 | 0.13 |
| D212S | 5035.28 | 4894.92 | 1.03 | 1.22 | 0.95 |
| D212P | 3270.81 | 2918.36 | 1.12 | 0.79 | 0.57 |
| D212Q | 2823.54 | 2576.63 | 1.10 | 0.68 | 0.50 |
| D212V | 2000.60 | 1876.86 | 1.07 | 0.48 | 0.36 |
| D212L | 517.72 | 497.60 | 1.04 | 0.13 | 0.10 |
| D212F | 2378.07 | 2185.27 | 1.09 | 0.57 | 0.42 |
| D212H | 4696.49 | 4001.41 | 1.17 | 0.70 | 0.53 |
| D212Y | 5489.99 | 5319.27 | 1.03 | 0.49 | 0.55 |
| I213Q | 9326.77 | 8702.80 | 1.07 | 0.96 | 0.95 |
| I213T | 9396.39 | 8742.82 | 1.07 | 0.96 | 0.96 |
| I213C | 9396.24 | 8859.11 | 1.06 | 0.96 | 0.97 |
| I213P | 10248.90 | 9319.88 | 1.10 | 1.05 | 1.02 |
| I213H | 9826.58 | 9076.23 | 1.08 | 1.01 | 1.00 |
| I213A | 10044.30 | 9249.07 | 1.09 | 1.03 | 1.01 |
| I213V | 10260.18 | 9459.80 | 1.08 | 1.05 | 1.04 |
| I213G | 21327.14 | 19706.88 | 1.08 | 2.19 | 2.16 |
| I213N | 8790.33 | 7995.03 | 1.10 | 0.90 | 0.88 |
| I213L | 9974.73 | 9208.92 | 1.08 | 1.02 | 1.01 |
| I213S | 9599.72 | 9004.65 | 1.07 | 0.98 | 0.99 |
| I213M | 9987.31 | 9083.77 | 1.10 | 1.02 | 1.00 |
| I213R | 9253.06 | 8997.34 | 1.03 | 0.95 | 0.99 |
| I213K | 9682.80 | 9286.32 | 1.04 | 0.99 | 1.02 |
| I213F | 9368.13 | 8940.38 | 1.05 | 0.96 | 0.98 |
| I213D | 7017.06 | 7368.43 | 0.95 | 0.77 | 0.97 |
| I213E | 8169.74 | 7234.77 | 1.13 | 0.90 | 0.95 |
| G214L | 13500.23 | 13135.46 | 1.03 | 1.38 | 1.44 |
| G214Q | 9914.48 | 9182.63 | 1.08 | 1.02 | 1.01 |
| G214S | 9503.68 | 9036.70 | 1.05 | 0.97 | 0.99 |
| G214T | 9940.86 | 9214.25 | 1.08 | 1.02 | 1.01 |
| G214V | 8185.36 | 7785.72 | 1.05 | 0.84 | 0.85 |
| G214I | 6068.79 | 5773.01 | 1.05 | 0.62 | 0.63 |
| G214R | 9720.43 | 9083.04 | 1.07 | 1.00 | 1.00 |
| G214P | 8763.31 | 8875.24 | 0.99 | 0.90 | 0.97 |
| G214E | 21602.30 | 19851.77 | 1.09 | 2.22 | 2.18 |
| G214A | 10063.30 | 9154.93 | 1.10 | 1.03 | 1.00 |
| G214D | 9967.49 | 9121.71 | 1.09 | 1.02 | 1.00 |
| G214F | 9750.30 | 9157.75 | 1.06 | 1.00 | 1.00 |
| G214Y | 9886.62 | 9025.45 | 1.10 | 1.01 | 0.99 |
| G214M | 9472.77 | 8919.05 | 1.06 | 0.97 | 0.98 |
| G214C | 6716.52 | 7097.60 | 0.95 | 0.69 | 0.78 |
| A215L | 454.59 | 428.41 | 1.06 | 0.07 | 0.06 |
| A215Q | 765.06 | 739.09 | 1.04 | 0.12 | 0.10 |
| A215M | 672.22 | 624.41 | 1.08 | 0.10 | 0.09 |
| A215G | 4240.44 | 6854.29 | 0.62 | 0.66 | 0.96 |
| A215W | 377.79 | 348.04 | 1.09 | 0.06 | 0.05 |
| A215S | 559.99 | 538.20 | 1.04 | 0.09 | 0.08 |
| A215T | 664.02 | 711.35 | 0.93 | 0.10 | 0.10 |
| A215V | 473.67 | 492.63 | 0.96 | 0.07 | 0.07 |
| A215N | 4328.77 | 4488.89 | 0.96 | 0.67 | 0.63 |
| A215P | 638.50 | 596.48 | 1.07 | 0.10 | 0.08 |
| A215H | 3954.04 | 4447.65 | 0.89 | 0.61 | 0.62 |
| A215K | 420.46 | 402.71 | 1.04 | 0.07 | 0.06 |
| A215I | 413.93 | 386.28 | 1.07 | 0.06 | 0.05 |
| A215R | 421.35 | 389.00 | 1.08 | 0.07 | 0.05 |
| A215C | 437.44 | 425.03 | 1.03 | 0.07 | 0.06 |
| A215D | 1031.48 | 913.25 | 1.13 | 0.11 | 0.12 |
| L216A | 808.93 | 759.54 | 1.07 | 0.13 | 0.12 |
| L216C | 473.05 | 462.23 | 1.02 | 0.08 | 0.07 |
| L216D | 497.61 | 457.15 | 1.09 | 0.08 | 0.07 |
| L216E | 480.72 | 458.21 | 1.05 | 0.08 | 0.07 |
| L216G | 473.61 | 452.00 | 1.05 | 0.08 | 0.07 |
| L216I | 7525.06 | 8586.88 | 0.88 | 1.20 | 1.37 |
| L216K | 478.52 | 460.66 | 1.04 | 0.08 | 0.07 |
| L216M | 4641.29 | 5160.67 | 0.90 | 0.74 | 0.83 |
| L216P | 466.46 | 475.96 | 0.98 | 0.07 | 0.08 |
| L216Q | 693.10 | 638.62 | 1.09 | 0.11 | 0.10 |
| L216R | 458.77 | 437.34 | 1.05 | 0.07 | 0.07 |
| L216S | 454.85 | 441.50 | 1.03 | 0.07 | 0.07 |
| L216T | 1484.74 | 1392.55 | 1.07 | 0.24 | 0.22 |
| L216V | 5022.20 | 6281.17 | 0.80 | 0.80 | 1.01 |
| L216W | 479.55 | 454.07 | 1.06 | 0.08 | 0.07 |
| M217P | 458.79 | 440.59 | 1.04 | 0.07 | 0.06 |
| M217Y | 459.96 | 427.87 | 1.07 | 0.07 | 0.06 |
| M217T | 699.27 | 663.16 | 1.05 | 0.11 | 0.09 |
| M217C | 5441.67 | 7486.86 | 0.73 | 0.85 | 1.05 |
| M217S | 470.92 | 424.03 | 1.11 | 0.07 | 0.06 |
| M217L | 443.33 | 403.49 | 1.10 | 0.07 | 0.06 |
| M217N | 462.12 | 424.21 | 1.09 | 0.07 | 0.06 |
| M217R | 454.58 | 442.20 | 1.03 | 0.07 | 0.06 |
| M217Q | 449.94 | 427.47 | 1.05 | 0.07 | 0.06 |
| M217K | 506.96 | 458.74 | 1.11 | 0.08 | 0.06 |
| M217G | 746.17 | 728.78 | 1.02 | 0.12 | 0.10 |
| M217A | 437.36 | 410.18 | 1.07 | 0.07 | 0.06 |
| M217H | 442.18 | 398.29 | 1.11 | 0.07 | 0.06 |
| M217I | 483.00 | 449.94 | 1.07 | 0.08 | 0.06 |
| M217D | 503.49 | 491.20 | 1.03 | 0.04 | 0.05 |
| Y218C | 511.72 | 486.65 | 1.05 | 0.08 | 0.07 |
| Y218F | 4555.92 | 6084.93 | 0.75 | 0.71 | 0.85 |
| Y218W | 8521.86 | 9311.36 | 0.92 | 1.32 | 1.30 |
| Y218L | 834.41 | 743.23 | 1.12 | 0.13 | 0.10 |
| Y218A | 1935.94 | 1652.76 | 1.17 | 0.30 | 0.23 |
| Y218P | 503.58 | 469.06 | 1.07 | 0.08 | 0.07 |
| Y218R | 508.52 | 465.38 | 1.09 | 0.08 | 0.07 |
| Y218N | 704.77 | 640.35 | 1.10 | 0.11 | 0.09 |
| Y218V | 527.03 | 480.30 | 1.10 | 0.08 | 0.07 |
| Y218Q | 513.25 | 468.66 | 1.10 | 0.08 | 0.07 |
| Y218I | 698.50 | 542.67 | 1.29 | 0.11 | 0.08 |
| Y218D | 835.29 | 885.84 | 0.94 | 0.13 | 0.12 |
| Y218S | 3702.49 | 3099.73 | 1.19 | 0.58 | 0.43 |
| Y218G | 504.65 | 460.32 | 1.10 | 0.08 | 0.06 |
| Y218E | 511.24 | 471.64 | 1.08 | 0.08 | 0.07 |
| P219L | 578.24 | 550.18 | 1.05 | 0.09 | 0.08 |
| P219C | 622.59 | 613.51 | 1.01 | 0.10 | 0.09 |
| P219V | 586.82 | 583.21 | 1.01 | 0.09 | 0.08 |
| P219D | 819.59 | 881.94 | 0.93 | 0.13 | 0.12 |
| P219F | 571.45 | 542.25 | 1.05 | 0.09 | 0.08 |
| P219A | 1749.52 | 1799.14 | 0.97 | 0.27 | 0.25 |
| P219T | 870.52 | 853.07 | 1.02 | 0.14 | 0.12 |
| P219E | 895.73 | 858.50 | 1.04 | 0.14 | 0.12 |
| P219Q | 601.64 | 557.23 | 1.08 | 0.09 | 0.08 |
| P219R | 580.05 | 533.83 | 1.09 | 0.09 | 0.07 |
| P219H | 595.81 | 592.49 | 1.01 | 0.09 | 0.08 |
| P219G | 625.62 | 619.20 | 1.01 | 0.10 | 0.09 |
| P219K | 647.47 | 633.20 | 1.02 | 0.10 | 0.09 |
| P219S | 1549.48 | 1669.93 | 0.93 | 0.24 | 0.23 |
| P219W | 929.41 | 912.72 | 1.02 | 0.14 | 0.13 |
| S220R | 7949.20 | 10460.71 | 0.76 | 1.23 | 1.46 |
| S220A | 9804.98 | 9347.41 | 1.05 | 1.52 | 1.31 |
| S220Q | 9804.83 | 9328.79 | 1.05 | 1.52 | 1.30 |
| S220T | 9371.43 | 9378.23 | 1.00 | 1.46 | 1.31 |
| S220L | 1688.62 | 2607.71 | 0.65 | 0.26 | 0.36 |
| S220K | 2607.58 | 3704.87 | 0.70 | 0.40 | 0.52 |
| S220G | 9916.14 | 9356.60 | 1.06 | 1.54 | 1.31 |
| S220H | 1496.17 | 1874.12 | 0.80 | 0.23 | 0.26 |
| S220E | 3553.14 | 3992.18 | 0.89 | 0.55 | 0.56 |
| S220M | 7913.94 | 8545.54 | 0.93 | 1.23 | 1.20 |
| S220V | 10179.81 | 9414.03 | 1.08 | 1.58 | 1.32 |
| S220P | 592.32 | 587.51 | 1.01 | 0.09 | 0.08 |
| S220I | 6596.23 | 8678.69 | 0.76 | 1.02 | 1.21 |
| S220F | 2458.37 | 3612.28 | 0.68 | 0.38 | 0.51 |
| S220N | 10548.94 | 9399.76 | 1.12 | 1.64 | 1.31 |
| Y221W | 1201.23 | 891.46 | 1.35 | 0.19 | 0.12 |
| Y221K | 595.72 | 575.31 | 1.04 | 0.09 | 0.08 |
| Y221Q | 592.45 | 568.96 | 1.04 | 0.09 | 0.08 |
| Y221C | 583.88 | 558.96 | 1.04 | 0.09 | 0.08 |
| Y221N | 607.96 | 599.09 | 1.01 | 0.09 | 0.08 |
| Y221P | 575.23 | 546.02 | 1.05 | 0.09 | 0.08 |
| Y221V | 600.84 | 608.45 | 0.99 | 0.09 | 0.09 |
| Y221A | 613.20 | 571.57 | 1.07 | 0.10 | 0.08 |
| Y221G | 558.30 | 544.78 | 1.02 | 0.09 | 0.08 |
| Y221R | 508.18 | 483.59 | 1.05 | 0.08 | 0.07 |
| Y221S | 551.66 | 511.82 | 1.08 | 0.09 | 0.07 |
| Y221M | 733.99 | 576.28 | 1.27 | 0.11 | 0.08 |
| Y221T | 552.92 | 554.37 | 1.00 | 0.09 | 0.08 |
| Y221L | 600.40 | 544.47 | 1.10 | 0.09 | 0.08 |
| Y221E | 585.19 | 609.28 | 0.96 | 0.09 | 0.09 |
| T222L | 1251.44 | 1749.83 | 0.72 | 0.21 | 0.25 |
| T222Y | 3088.86 | 4344.09 | 0.71 | 0.52 | 0.61 |
| T222R | 7857.83 | 8130.34 | 0.97 | 1.33 | 1.14 |
| T222V | 6050.08 | 7520.37 | 0.80 | 1.03 | 1.06 |
| T222P | 9566.57 | 8477.71 | 1.13 | 1.62 | 1.19 |
| T222S | 8669.64 | 8464.76 | 1.02 | 1.47 | 1.19 |
| T222A | 5927.34 | 6623.26 | 0.89 | 1.00 | 0.93 |
| T222H | 4207.02 | 5413.49 | 0.78 | 0.71 | 0.76 |
| T222G | 7265.81 | 7630.73 | 0.95 | 1.23 | 1.07 |
| T222M | 4765.98 | 5354.04 | 0.89 | 0.81 | 0.75 |
| T222F | 8084.32 | 8023.96 | 1.01 | 1.37 | 1.13 |
| T222C | 1134.10 | 1047.66 | 1.08 | 0.19 | 0.15 |
| T222I | 489.93 | 514.09 | 0.95 | 0.08 | 0.07 |
| T222N | 8082.92 | 8215.81 | 0.98 | 1.37 | 1.15 |
| T222W | 4390.84 | 5903.99 | 0.74 | 0.74 | 0.83 |
| T222D | 4859.28 | 5584.93 | 0.87 | 0.53 | 0.73 |
| F223L | 2776.43 | 3305.29 | 0.84 | 0.47 | 0.46 |
| F223T | 7801.97 | 7792.62 | 1.00 | 1.32 | 1.09 |
| F223C | 3115.11 | 2488.91 | 1.25 | 0.53 | 0.35 |
| F223R | 5508.50 | 5094.99 | 1.08 | 0.93 | 0.71 |
| F223N | 7434.46 | 6650.94 | 1.12 | 1.26 | 0.93 |
| F223P | 8466.83 | 7678.71 | 1.10 | 1.43 | 1.08 |
| F223E | 7194.34 | 5884.03 | 1.22 | 1.22 | 0.83 |
| F223G | 3236.56 | 2599.04 | 1.25 | 0.55 | 0.36 |
| F223Q | 8100.68 | 7468.16 | 1.08 | 1.37 | 1.05 |
| F223A | 5226.86 | 3982.92 | 1.31 | 0.89 | 0.56 |
| F223S | 6006.80 | 4916.07 | 1.22 | 1.02 | 0.69 |
| F223Y | 9072.25 | 8479.33 | 1.07 | 1.54 | 1.19 |
| F223H | 8573.59 | 8056.97 | 1.06 | 1.45 | 1.13 |
| F223K | 4021.97 | 3712.91 | 1.08 | 0.60 | 0.49 |
| F223M | 525.66 | 441.29 | 1.19 | 0.08 | 0.06 |
| S224G | 5580.59 | 6030.81 | 0.93 | 0.89 | 0.97 |
| S224T | 6189.79 | 7398.93 | 0.84 | 0.99 | 1.18 |
| S224Q | 7258.89 | 8221.79 | 0.88 | 1.16 | 1.32 |
| S224R | 4718.67 | 4984.94 | 0.95 | 0.76 | 0.80 |
| S224P | 475.19 | 459.57 | 1.03 | 0.08 | 0.07 |
| S224I | 5653.45 | 6319.33 | 0.89 | 0.90 | 1.01 |
| S224V | 4074.45 | 5042.87 | 0.81 | 0.65 | 0.81 |
| S224L | 4272.54 | 5590.35 | 0.76 | 0.68 | 0.89 |
| S224C | 4057.16 | 4912.59 | 0.83 | 0.65 | 0.79 |
| S224K | 7286.24 | 8122.32 | 0.90 | 1.17 | 1.30 |
| S224D | 7201.97 | 8490.41 | 0.85 | 1.15 | 1.36 |
| S224H | 5928.85 | 6787.33 | 0.87 | 0.95 | 1.09 |
| S224M | 5967.51 | 6770.07 | 0.88 | 0.95 | 1.08 |
| S224A | 469.39 | 427.21 | 1.10 | 0.08 | 0.07 |
| S224W | 4323.69 | 5971.55 | 0.72 | 0.69 | 0.96 |
| G225D | 4925.13 | 4615.89 | 1.07 | 0.83 | 0.65 |
| G225R | 6317.32 | 6775.84 | 0.93 | 1.07 | 0.95 |
| G225Q | 8693.50 | 8267.06 | 1.05 | 1.47 | 1.16 |
| G225M | 3626.70 | 3585.88 | 1.01 | 0.61 | 0.50 |
| G225P | 4775.00 | 4558.87 | 1.05 | 0.81 | 0.64 |
| G225W | 6452.91 | 7515.31 | 0.86 | 1.09 | 1.05 |
| G225S | 4811.54 | 4789.30 | 1.00 | 0.82 | 0.67 |
| G225E | 9174.21 | 8356.85 | 1.10 | 1.55 | 1.17 |
| G225V | 3525.03 | 3330.02 | 1.06 | 0.60 | 0.47 |
| G225T | 7463.15 | 7841.71 | 0.95 | 1.26 | 1.10 |
| G225K | 7135.01 | 7721.15 | 0.92 | 1.21 | 1.08 |
| G225N | 5858.96 | 5807.35 | 1.01 | 0.99 | 0.81 |
| G225C | 1631.86 | 1835.77 | 0.89 | 0.28 | 0.26 |
| G225H | 8719.92 | 8448.61 | 1.03 | 1.48 | 1.19 |
| G225A | 6048.29 | 5768.91 | 1.05 | 1.03 | 0.81 |
| D226S | 8608.26 | 8605.77 | 1.00 | 1.46 | 1.21 |
| D226W | 1817.34 | 2172.37 | 0.84 | 0.31 | 0.30 |
| D226R | 5584.63 | 7070.57 | 0.79 | 0.95 | 0.99 |
| D226A | 6987.67 | 7786.46 | 0.90 | 1.18 | 1.09 |
| D226N | 6464.01 | 7314.30 | 0.88 | 1.10 | 1.03 |
| D226T | 3450.45 | 4219.45 | 0.82 | 0.58 | 0.59 |
| D226E | 9308.62 | 8744.05 | 1.06 | 1.58 | 1.23 |
| D226L | 3411.80 | 4254.22 | 0.80 | 0.58 | 0.60 |
| D226P | 8574.77 | 8325.60 | 1.03 | 1.45 | 1.17 |
| D226H | 4217.71 | 4180.90 | 1.01 | 0.71 | 0.59 |
| D226G | 6320.31 | 7359.33 | 0.86 | 1.07 | 1.03 |
| D226I | 7753.45 | 8016.92 | 0.97 | 1.31 | 1.12 |
| D226M | 6501.53 | 7210.62 | 0.90 | 1.10 | 1.01 |
| D226V | 3680.55 | 4504.86 | 0.82 | 0.62 | 0.63 |
| D226C | 7227.15 | 7735.09 | 0.93 | 1.22 | 1.09 |
| V227A | 5109.18 | 5056.19 | 1.01 | 0.87 | 0.71 |
| V227C | 4040.96 | 3278.65 | 1.23 | 0.68 | 0.46 |
| V227D | 1190.09 | 731.34 | 1.63 | 0.20 | 0.10 |
| V227E | 5381.63 | 2605.20 | 2.07 | 0.91 | 0.37 |
| V227K | 580.24 | 550.24 | 1.05 | 0.10 | 0.08 |
| V227L | 4883.98 | 4000.68 | 1.22 | 0.83 | 0.56 |
| V227P | 3682.22 | 3644.94 | 1.01 | 0.62 | 0.51 |
| V227S | 3863.33 | 3131.47 | 1.23 | 0.65 | 0.44 |
| V227T | 9817.63 | 8523.33 | 1.15 | 1.66 | 1.20 |
| V227W | 1845.46 | 1374.06 | 1.34 | 0.31 | 0.19 |
| V227Y | 657.68 | 542.07 | 1.21 | 0.11 | 0.08 |
| V227G | 1040.74 | 883.01 | 1.18 | 0.15 | 0.12 |
| V227H | 689.20 | 504.65 | 1.37 | 0.10 | 0.07 |
| V227Q | 696.97 | 506.11 | 1.38 | 0.10 | 0.07 |
| V227R | 664.31 | 561.06 | 1.18 | 0.10 | 0.07 |
| Q228A | 9710.68 | 9175.62 | 1.06 | 4.50 | 3.13 |
| Q228D | 10931.89 | 9274.00 | 1.18 | 5.06 | 3.16 |
| Q228E | 9825.63 | 9396.31 | 1.05 | 4.55 | 3.20 |
| Q228G | 9400.23 | 9058.34 | 1.04 | 4.35 | 3.09 |
| Q228H | 9748.08 | 9288.74 | 1.05 | 4.51 | 3.17 |
| Q228K | 9999.23 | 9262.11 | 1.08 | 4.63 | 3.16 |
| Q228L | 9199.01 | 8900.02 | 1.03 | 4.26 | 3.03 |
| Q228M | 9510.07 | 8915.79 | 1.07 | 4.40 | 3.04 |
| Q228N | 8774.26 | 8679.09 | 1.01 | 4.06 | 2.96 |
| Q228P | 2862.74 | 1291.55 | 2.22 | 1.33 | 0.44 |
| Q228R | 7443.02 | 8091.71 | 0.92 | 3.45 | 2.76 |
| Q228S | 8188.30 | 8162.27 | 1.00 | 3.79 | 2.78 |
| Q228T | 4335.26 | 5179.47 | 0.84 | 2.01 | 1.77 |
| Q228W | 6169.39 | 6508.89 | 0.95 | 2.86 | 2.22 |
| Q228Y | 7426.87 | 7840.08 | 0.95 | 3.44 | 2.67 |
| L229R | 485.95 | 489.74 | 0.99 | 0.22 | 0.17 |
| L229A | 2627.78 | 2118.07 | 1.24 | 1.22 | 0.72 |
| L229T | 3780.54 | 1464.25 | 2.58 | 1.75 | 0.50 |
| L229Q | 5328.09 | 5303.89 | 1.00 | 2.47 | 1.81 |
| L229P | 4795.14 | 5009.73 | 0.96 | 2.22 | 1.71 |
| L229E | 737.30 | 657.34 | 1.12 | 0.34 | 0.22 |
| L229W | 577.28 | 520.84 | 1.11 | 0.27 | 0.18 |
| L229M | 3207.73 | 2829.20 | 1.13 | 1.49 | 0.96 |
| L229I | 1158.56 | 828.94 | 1.40 | 0.54 | 0.28 |
| L229G | 552.22 | 520.30 | 1.06 | 0.26 | 0.18 |
| L229C | 633.99 | 516.61 | 1.23 | 0.29 | 0.18 |
| L229Y | 549.90 | 504.60 | 1.09 | 0.25 | 0.17 |
| L229D | 498.06 | 485.50 | 1.03 | 0.23 | 0.17 |
| L229H | 551.54 | 501.77 | 1.10 | 0.26 | 0.17 |
| L229V | 6249.58 | 6487.57 | 0.96 | 2.89 | 2.21 |
| A230L | 3437.91 | 2154.62 | 1.60 | 1.59 | 0.73 |
| A230G | 6804.87 | 8304.63 | 0.82 | 3.15 | 2.83 |
| A230W | 4773.24 | 5118.69 | 0.93 | 2.21 | 1.74 |
| A230P | 699.78 | 568.62 | 1.23 | 0.32 | 0.19 |
| A230D | 7281.83 | 8033.59 | 0.91 | 3.37 | 2.74 |
| A230R | 2986.52 | 2304.10 | 1.30 | 1.38 | 0.79 |
| A230I | 4609.64 | 3490.44 | 1.32 | 2.13 | 1.19 |
| A230S | 9181.71 | 8982.15 | 1.02 | 4.25 | 3.06 |
| A230C | 5061.18 | 5781.86 | 0.88 | 2.34 | 1.97 |
| A230V | 5030.94 | 3433.18 | 1.47 | 2.33 | 1.17 |
| A230T | 8822.74 | 9169.52 | 0.96 | 4.08 | 3.13 |
| A230Y | 3327.47 | 2858.53 | 1.16 | 1.54 | 0.97 |
| A230M | 9543.01 | 9520.33 | 1.00 | 4.42 | 3.25 |
| A230N | 9217.40 | 9384.02 | 0.98 | 4.27 | 3.20 |
| A230H | 8514.47 | 6763.46 | 1.26 | 3.94 | 2.31 |
| Q231I | 4161.47 | 3993.24 | 1.04 | 1.93 | 1.36 |
| Q231A | 6899.50 | 6650.48 | 1.04 | 3.19 | 2.27 |
| Q231F | 4049.29 | 4120.56 | 0.98 | 1.87 | 1.40 |
| Q231P | 613.73 | 591.34 | 1.04 | 0.28 | 0.20 |
| Q231Y | 2460.04 | 2960.32 | 0.83 | 1.14 | 1.01 |
| Q231R | 366.16 | 1013.08 | 0.36 | 0.17 | 0.35 |
| Q231L | 3744.09 | 2834.26 | 1.32 | 1.73 | 0.97 |
| Q231D | 7507.92 | 7957.26 | 0.94 | 3.48 | 2.71 |
| Q231G | 5743.70 | 6012.88 | 0.96 | 2.66 | 2.05 |
| Q231V | 6114.28 | 6172.88 | 0.99 | 2.83 | 2.10 |
| Q231W | 4910.80 | 4767.26 | 1.03 | 2.27 | 1.62 |
| Q231S | 6593.10 | 7180.32 | 0.92 | 3.05 | 2.45 |
| Q231H | 4961.12 | 5622.05 | 0.88 | 2.30 | 1.92 |
| Q231C | 970.74 | 697.37 | 1.39 | 0.45 | 0.24 |
| Q231M | 3314.86 | 4166.20 | 0.80 | 1.53 | 1.42 |
| D232H | 6046.51 | 7174.55 | 0.84 | 2.80 | 2.45 |
| D232G | 5492.29 | 7079.04 | 0.78 | 2.54 | 2.41 |
| D232R | 5077.01 | 5692.86 | 0.89 | 2.35 | 1.94 |
| D232P | 7665.95 | 8291.54 | 0.92 | 3.55 | 2.83 |
| D232Y | 3001.62 | 3628.15 | 0.83 | 1.39 | 1.24 |
| D232N | 825.42 | 739.97 | 1.12 | 0.38 | 0.25 |
| D232S | 14389.74 | 5104.26 | 2.82 | 6.66 | 1.74 |
| D232F | 3599.26 | 3719.64 | 0.97 | 1.67 | 1.27 |
| D232V | 7938.31 | 9176.75 | 0.87 | 3.68 | 3.13 |
| D232K | 4844.31 | 5829.58 | 0.83 | 2.24 | 1.99 |
| D232W | 8404.13 | 9037.60 | 0.93 | 3.89 | 3.08 |
| D232Q | 7550.58 | 8008.46 | 0.94 | 3.50 | 2.73 |
| D232E | 9294.39 | 9251.91 | 1.00 | 4.30 | 3.15 |
| D232T | 9434.20 | 9583.53 | 0.98 | 4.37 | 3.27 |
| D232L | 7603.68 | 4213.70 | 1.80 | 3.52 | 1.44 |
| D233Q | 653.34 | 640.95 | 1.02 | 0.30 | 0.22 |
| D233P | 629.51 | 626.42 | 1.00 | 0.29 | 0.21 |
| D233S | 637.89 | 623.07 | 1.02 | 0.30 | 0.21 |
| D233T | 621.24 | 615.06 | 1.01 | 0.29 | 0.21 |
| D233A | 650.58 | 634.46 | 1.03 | 0.30 | 0.22 |
| D233W | 644.19 | 649.94 | 0.99 | 0.30 | 0.22 |
| D233G | 657.96 | 666.27 | 0.99 | 0.30 | 0.23 |
| D233R | 715.14 | 467.03 | 1.53 | 0.33 | 0.16 |
| D233E | 2881.17 | 1918.57 | 1.50 | 1.33 | 0.65 |
| D233N | 580.50 | 572.32 | 1.01 | 0.27 | 0.20 |
| D233V | 609.36 | 603.42 | 1.01 | 0.28 | 0.21 |
| D233M | 581.45 | 593.79 | 0.98 | 0.27 | 0.20 |
| D233L | 584.42 | 597.47 | 0.98 | 0.27 | 0.20 |
| D233K | 608.53 | 615.71 | 0.99 | 0.28 | 0.21 |
| D233I | 682.66 | 661.78 | 1.03 | 0.32 | 0.23 |
| I234A | 1458.10 | 1018.50 | 1.43 | 0.31 | 0.18 |
| I234T | 1451.51 | 1188.67 | 1.22 | 0.31 | 0.21 |
| I234V | 3474.82 | 5245.94 | 0.66 | 0.73 | 0.91 |
| I234W | 743.35 | 570.02 | 1.30 | 0.16 | 0.10 |
| I234E | 1301.06 | 840.09 | 1.55 | 0.27 | 0.15 |
| I234G | 498.38 | 467.78 | 1.07 | 0.10 | 0.08 |
| I234L | 2584.47 | 3312.61 | 0.78 | 0.54 | 0.57 |
| I234H | 684.95 | 503.63 | 1.36 | 0.14 | 0.09 |
| I234M | 3478.87 | 4732.62 | 0.74 | 0.73 | 0.82 |
| I234N | 633.30 | 513.69 | 1.23 | 0.13 | 0.09 |
| I234Y | 749.28 | 930.94 | 0.80 | 0.16 | 0.16 |
| I234P | 470.41 | 431.33 | 1.09 | 0.10 | 0.07 |
| I234D | 428.28 | 397.06 | 1.08 | 0.09 | 0.07 |
| I234Q | 1095.18 | 837.53 | 1.31 | 0.23 | 0.15 |
| I234C | 702.09 | 483.22 | 1.45 | 0.15 | 0.08 |
| D235H | 5217.44 | 6443.75 | 0.81 | 1.10 | 1.12 |
| D235G | 5966.03 | 6875.44 | 0.87 | 1.26 | 1.19 |
| D235A | 5874.20 | 9191.04 | 0.64 | 1.24 | 1.59 |
| D235P | 488.90 | 464.91 | 1.05 | 0.10 | 0.08 |
| D235L | 6353.97 | 6868.10 | 0.93 | 1.34 | 1.19 |
| D235V | 4167.59 | 6418.00 | 0.65 | 0.88 | 1.11 |
| D235E | 8377.14 | 8154.10 | 1.03 | 1.76 | 1.41 |
| D235R | 7249.34 | 7013.16 | 1.03 | 1.53 | 1.22 |
| D235Q | 6969.55 | 7752.26 | 0.90 | 1.47 | 1.34 |
| D235T | 6608.45 | 7282.18 | 0.91 | 1.39 | 1.26 |
| D235C | 3805.25 | 5237.38 | 0.73 | 0.80 | 0.91 |
| D235S | 3798.36 | 6310.00 | 0.60 | 0.80 | 1.09 |
| D235N | 6427.98 | 6780.43 | 0.95 | 1.35 | 1.18 |
| D235Y | 3539.06 | 3728.70 | 0.95 | 0.75 | 0.65 |
| D235I | 5390.78 | 5499.20 | 0.98 | 1.14 | 0.95 |
| G236M | 8157.95 | 7452.06 | 1.09 | 1.72 | 1.29 |
| G236R | 8890.85 | 8115.23 | 1.10 | 1.87 | 1.41 |
| G236D | 3820.99 | 4576.94 | 0.83 | 0.80 | 0.79 |
| G236S | 9887.69 | 8558.48 | 1.16 | 2.08 | 1.48 |
| G236T | 6244.13 | 7949.24 | 0.79 | 1.32 | 1.38 |
| G236C | 8441.80 | 7993.25 | 1.06 | 1.78 | 1.39 |
| G236K | 9473.18 | 8370.29 | 1.13 | 2.00 | 1.45 |
| G236E | 7240.97 | 7573.43 | 0.96 | 1.53 | 1.31 |
| G236P | 969.12 | 668.23 | 1.45 | 0.20 | 0.12 |
| G236I | 5356.96 | 5189.19 | 1.03 | 1.13 | 0.90 |
| G236Y | 4511.53 | 5725.61 | 0.79 | 0.95 | 0.99 |
| G236L | 8099.87 | 7699.72 | 1.05 | 1.71 | 1.34 |
| G236V | 4448.72 | 6422.58 | 0.69 | 0.94 | 1.11 |
| G236N | 8477.40 | 8088.17 | 1.05 | 1.79 | 1.40 |
| G236F | 5761.86 | 5560.83 | 1.04 | 1.21 | 0.96 |
| I237S | 587.31 | 536.19 | 1.10 | 0.12 | 0.09 |
| I237L | 2880.14 | 2240.61 | 1.29 | 0.61 | 0.39 |
| I237R | 572.70 | 548.66 | 1.04 | 0.12 | 0.10 |
| I237Q | 552.21 | 543.69 | 1.02 | 0.12 | 0.09 |
| I237K | 571.56 | 531.05 | 1.08 | 0.12 | 0.09 |
| I237D | 567.39 | 512.64 | 1.11 | 0.12 | 0.09 |
| I237A | 1512.93 | 2138.58 | 0.71 | 0.32 | 0.37 |
| I237T | 572.40 | 524.74 | 1.09 | 0.12 | 0.09 |
| I237E | 555.97 | 535.94 | 1.04 | 0.12 | 0.09 |
| I237C | 565.11 | 532.36 | 1.06 | 0.12 | 0.09 |
| I237G | 620.23 | 586.38 | 1.06 | 0.13 | 0.10 |
| I237P | 554.04 | 497.24 | 1.11 | 0.12 | 0.09 |
| I237Y | 688.92 | 602.65 | 1.14 | 0.15 | 0.10 |
| I237W | 4188.38 | 5663.94 | 0.74 | 0.62 | 0.75 |
| I237N | 5368.49 | 6271.59 | 0.86 | 0.80 | 0.83 |
| Q238G | 1382.45 | 2524.64 | 0.55 | 0.29 | 0.44 |
| Q238H | 3150.20 | 5045.01 | 0.62 | 0.66 | 0.88 |
| Q238S | 3298.60 | 4524.89 | 0.73 | 0.69 | 0.78 |
| Q238Y | 2078.90 | 2953.44 | 0.70 | 0.44 | 0.51 |
| Q238F | 1342.33 | 1916.87 | 0.70 | 0.28 | 0.33 |
| Q238E | 4075.95 | 5719.51 | 0.71 | 0.86 | 0.99 |
| Q238L | 3030.44 | 4771.52 | 0.64 | 0.64 | 0.83 |
| Q238W | 3649.81 | 4317.00 | 0.85 | 0.77 | 0.75 |
| Q238P | 568.68 | 548.50 | 1.04 | 0.12 | 0.10 |
| Q238R | 4199.78 | 5952.76 | 0.71 | 0.88 | 1.03 |
| Q238C | 3179.60 | 4072.46 | 0.78 | 0.67 | 0.71 |
| Q238N | 3119.13 | 3894.89 | 0.80 | 0.66 | 0.68 |
| Q238I | 3863.21 | 5191.15 | 0.74 | 0.81 | 0.90 |
| Q238T | 7425.48 | 7998.67 | 0.93 | 1.56 | 1.39 |
| Q238K | 4717.87 | 5952.01 | 0.79 | 0.99 | 1.03 |
| A239S | 7235.02 | 7630.43 | 0.95 | 1.52 | 1.32 |
| A239Q | 4817.25 | 8226.13 | 0.59 | 1.01 | 1.43 |
| A239T | 1232.13 | 2351.52 | 0.52 | 0.26 | 0.41 |
| A239P | 606.39 | 564.14 | 1.07 | 0.13 | 0.10 |
| A239V | 6075.94 | 6919.38 | 0.88 | 1.28 | 1.20 |
| A239L | 7174.28 | 7878.58 | 0.91 | 1.51 | 1.37 |
| A239Y | 5570.87 | 6668.58 | 0.84 | 1.17 | 1.16 |
| A239I | 6821.36 | 7628.60 | 0.89 | 1.44 | 1.32 |
| A239C | 4986.74 | 5916.10 | 0.84 | 1.05 | 1.03 |
| A239G | 6430.98 | 7617.20 | 0.84 | 1.35 | 1.32 |
| A239W | 2215.28 | 4554.04 | 0.49 | 0.47 | 0.79 |
| A239F | 719.92 | 750.33 | 0.96 | 0.15 | 0.13 |
| A239K | 8365.39 | 8161.53 | 1.02 | 1.76 | 1.42 |
| A239H | 6013.93 | 6892.53 | 0.87 | 1.27 | 1.20 |
| A239R | 8860.20 | 8322.26 | 1.06 | 1.87 | 1.44 |
| A239D | 9256.74 | 8197.40 | 1.13 | 1.02 | 1.08 |
| I240G | 550.59 | 455.20 | 1.21 | 0.09 | 0.06 |
| I240Q | 1050.40 | 921.68 | 1.14 | 0.16 | 0.12 |
| I240P | 2259.38 | 3251.71 | 0.69 | 0.35 | 0.42 |
| I240R | 2771.00 | 3465.26 | 0.80 | 0.43 | 0.44 |
| I240S | 2033.91 | 1204.66 | 1.69 | 0.32 | 0.15 |
| I240K | 5557.21 | 6183.54 | 0.90 | 0.87 | 0.79 |
| I240V | 4682.76 | 6307.59 | 0.74 | 0.73 | 0.81 |
| I240D | 480.83 | 456.39 | 1.05 | 0.08 | 0.06 |
| I240A | 2099.13 | 1776.41 | 1.18 | 0.33 | 0.23 |
| I240C | 970.78 | 650.04 | 1.49 | 0.15 | 0.08 |
| I240L | 8303.04 | 8506.66 | 0.98 | 1.30 | 1.09 |
| I240F | 1345.29 | 2090.14 | 0.64 | 0.21 | 0.27 |
| I240Y | 1910.61 | 1482.53 | 1.29 | 0.30 | 0.19 |
| I240M | 8056.10 | 7463.56 | 1.08 | 1.26 | 0.95 |
| I240T | 2147.14 | 1862.29 | 1.15 | 0.34 | 0.24 |
| Y241V | 568.18 | 567.15 | 1.00 | 0.09 | 0.07 |
| Y241A | 514.00 | 498.25 | 1.03 | 0.08 | 0.06 |
| Y241G | 484.83 | 493.78 | 0.98 | 0.08 | 0.06 |
| Y241H | 555.41 | 547.86 | 1.01 | 0.09 | 0.07 |
| Y241R | 479.35 | 491.61 | 0.98 | 0.08 | 0.06 |
| Y241P | 542.62 | 468.74 | 1.16 | 0.09 | 0.06 |
| Y241Q | 494.42 | 468.65 | 1.05 | 0.08 | 0.06 |
| Y241L | 486.82 | 484.95 | 1.00 | 0.08 | 0.06 |
| Y241T | 574.08 | 548.16 | 1.05 | 0.09 | 0.07 |
| Y241S | 512.62 | 498.70 | 1.03 | 0.08 | 0.06 |
| Y241W | 592.83 | 556.32 | 1.07 | 0.09 | 0.07 |
| Y241N | 438.44 | 443.51 | 0.99 | 0.07 | 0.06 |
| Y241M | 488.24 | 448.13 | 1.09 | 0.08 | 0.06 |
| Y241I | 469.78 | 446.31 | 1.05 | 0.07 | 0.06 |
| Y241D | 454.99 | 443.57 | 1.03 | 0.07 | 0.06 |
| G242A | 1948.43 | 1965.86 | 0.99 | 0.31 | 0.25 |
| G242F | 2367.13 | 2861.31 | 0.83 | 0.37 | 0.37 |
| G242L | 4261.36 | 6043.02 | 0.71 | 0.67 | 0.77 |
| G242N | 1712.51 | 1893.88 | 0.90 | 0.27 | 0.24 |
| G242P | 2683.19 | 3311.87 | 0.81 | 0.42 | 0.42 |
| G242W | 1200.76 | 1522.34 | 0.79 | 0.19 | 0.19 |
| G242T | 1845.15 | 1926.23 | 0.96 | 0.29 | 0.25 |
| G242R | 1425.79 | 1462.84 | 0.97 | 0.22 | 0.19 |
| G242V | 1864.42 | 2075.51 | 0.90 | 0.29 | 0.27 |
| G242S | 3463.26 | 4491.54 | 0.77 | 0.54 | 0.57 |
| G242I | 881.04 | 2441.87 | 0.36 | 0.14 | 0.31 |
| G242Y | 895.61 | 928.34 | 0.96 | 0.14 | 0.12 |
| G242H | 1038.60 | 1063.68 | 0.98 | 0.16 | 0.14 |
| G242E | 1039.40 | 1200.19 | 0.87 | 0.16 | 0.15 |
| G242K | 1259.85 | 1404.80 | 0.90 | 0.20 | 0.18 |
| R243P | 3936.04 | 7438.61 | 0.53 | 0.62 | 0.95 |
| R243K | 8397.44 | 8514.77 | 0.99 | 1.32 | 1.09 |
| R243T | 7451.28 | 7306.32 | 1.02 | 1.17 | 0.93 |
| R243L | 6953.44 | 7458.28 | 0.93 | 1.09 | 0.95 |
| R243A | 8253.02 | 8378.15 | 0.99 | 1.29 | 1.07 |
| R243H | 6757.06 | 7710.25 | 0.88 | 1.06 | 0.99 |
| R243Q | 7563.55 | 8367.33 | 0.90 | 1.19 | 1.07 |
| R243S | 7872.26 | 8367.98 | 0.94 | 1.23 | 1.07 |
| R243I | 4421.12 | 8337.68 | 0.53 | 0.69 | 1.07 |
| R243C | 6128.24 | 6907.63 | 0.89 | 0.96 | 0.88 |
| R243N | 7064.71 | 7808.36 | 0.90 | 1.11 | 1.00 |
| R243Y | 6415.10 | 7427.20 | 0.86 | 1.01 | 0.95 |
| R243G | 9279.36 | 8697.39 | 1.07 | 1.46 | 1.11 |
| R243D | 5769.78 | 6318.28 | 0.91 | 0.90 | 0.81 |
| R243V | 6349.88 | 7531.41 | 0.84 | 1.00 | 0.96 |
| S244P | 7394.47 | 7844.16 | 0.94 | 1.16 | 1.00 |
| S244L | 3480.19 | 7154.31 | 0.49 | 0.55 | 0.91 |
| S244W | 10346.96 | 9035.98 | 1.15 | 1.62 | 1.15 |
| S244M | 728.14 | 748.02 | 0.97 | 0.11 | 0.10 |
| S244V | 6842.04 | 7456.02 | 0.92 | 1.07 | 0.95 |
| S244Q | 9318.66 | 8746.49 | 1.07 | 1.46 | 1.12 |
| S244D | 6915.01 | 7609.44 | 0.91 | 1.08 | 0.97 |
| S244E | 8814.39 | 8156.16 | 1.08 | 1.38 | 1.04 |
| S244T | 7442.34 | 8205.48 | 0.91 | 1.17 | 1.05 |
| S244H | 5019.42 | 8528.78 | 0.59 | 0.79 | 1.09 |
| S244G | 888.96 | 801.21 | 1.11 | 0.14 | 0.10 |
| S244A | 9174.68 | 8474.43 | 1.08 | 1.44 | 1.08 |
| S244F | 962.91 | 1017.49 | 0.95 | 0.15 | 0.13 |
| S244Y | 6333.20 | 6595.86 | 0.96 | 0.99 | 0.84 |
| S244R | 10483.23 | 9488.64 | 1.10 | 0.93 | 0.99 |
| Q245P | 8046.62 | 8690.91 | 0.93 | 1.26 | 1.11 |
| Q245I | 7611.43 | 8270.47 | 0.92 | 1.19 | 1.06 |
| Q245F | 3940.03 | 8048.83 | 0.49 | 0.62 | 1.03 |
| Q245V | 7785.27 | 8186.90 | 0.95 | 1.22 | 1.05 |
| Q245M | 494.18 | 323.62 | 1.53 | 0.08 | 0.04 |
| Q245T | 8684.29 | 8676.53 | 1.00 | 1.36 | 1.11 |
| Q245E | 10044.47 | 8646.78 | 1.16 | 1.58 | 1.10 |
| Q245S | 8700.39 | 8695.56 | 1.00 | 1.36 | 1.11 |
| Q245R | 8323.06 | 8629.37 | 0.96 | 1.31 | 1.10 |
| Q245G | 8495.47 | 8561.87 | 0.99 | 1.33 | 1.09 |
| Q245H | 8236.63 | 8640.32 | 0.95 | 1.29 | 1.10 |
| Q245L | 6762.99 | 6774.37 | 1.00 | 1.06 | 0.87 |
| Q245K | 347.86 | 290.28 | 1.20 | 0.05 | 0.04 |
| Q245W | 7517.93 | 8157.63 | 0.92 | 1.18 | 1.04 |
| Q245C | 7377.19 | 7707.00 | 0.96 | 1.16 | 0.98 |
| N246W | 3998.57 | 5256.41 | 0.76 | 0.55 | 0.68 |
| N246R | 6324.43 | 7263.78 | 0.87 | 0.87 | 0.93 |
| N246A | 7162.60 | 7821.64 | 0.92 | 0.98 | 1.00 |
| N246F | 5961.78 | 6704.16 | 0.89 | 0.82 | 0.86 |
| N246G | 7132.52 | 7954.86 | 0.90 | 0.98 | 1.02 |
| N246P | 5753.82 | 6382.30 | 0.90 | 0.79 | 0.82 |
| N246V | 7113.82 | 7563.12 | 0.94 | 0.98 | 0.97 |
| N246Q | 8249.22 | 7962.93 | 1.04 | 1.13 | 1.02 |
| N246Y | 6460.04 | 7091.47 | 0.91 | 0.89 | 0.91 |
| N246C | 3668.07 | 4131.97 | 0.89 | 0.50 | 0.53 |
| N246I | 6761.84 | 6684.68 | 1.01 | 0.93 | 0.86 |
| N246L | 7470.87 | 7558.25 | 0.99 | 1.03 | 0.97 |
| N246S | 7681.59 | 7872.41 | 0.98 | 1.05 | 1.01 |
| N246T | 7476.51 | 7504.31 | 1.00 | 1.03 | 0.96 |
| N246K | 8008.77 | 7820.31 | 1.02 | 1.10 | 1.00 |
| N246D | 7062.38 | 7827.99 | 0.90 | 0.78 | 1.03 |
| P247A | 8242.00 | 7947.96 | 1.04 | 1.13 | 1.02 |
| P247D | 6640.01 | 7179.97 | 0.92 | 0.91 | 0.92 |
| P247E | 8181.45 | 7231.43 | 1.13 | 1.12 | 0.93 |
| P247F | 8964.42 | 7929.76 | 1.13 | 1.23 | 1.02 |
| P247G | 7256.65 | 7455.20 | 0.97 | 1.00 | 0.96 |
| P247H | 8093.84 | 7667.72 | 1.06 | 1.11 | 0.99 |
| P247I | 7375.24 | 7729.05 | 0.95 | 1.01 | 0.99 |
| P247K | 8454.74 | 7912.16 | 1.07 | 1.16 | 1.02 |
| P247L | 8316.29 | 8009.70 | 1.04 | 1.14 | 1.03 |
| P247N | 8142.72 | 8006.73 | 1.02 | 1.12 | 1.03 |
| P247Q | 8231.43 | 7739.72 | 1.06 | 1.13 | 0.99 |
| P247R | 7029.19 | 7443.10 | 0.94 | 0.96 | 0.96 |
| P247S | 8040.91 | 7895.89 | 1.02 | 1.10 | 1.01 |
| P247T | 7243.03 | 7527.94 | 0.96 | 0.99 | 0.97 |
| P247V | 7907.19 | 7717.20 | 1.02 | 1.08 | 0.99 |
| V248W | 6631.29 | 6916.87 | 0.96 | 0.91 | 0.89 |
| V248L | 8767.88 | 8252.54 | 1.06 | 1.20 | 1.06 |
| V248Q | 6709.44 | 6735.33 | 1.00 | 0.92 | 0.87 |
| V248M | 7437.73 | 7338.43 | 1.01 | 1.02 | 0.94 |
| V248Y | 6509.63 | 6927.69 | 0.94 | 0.89 | 0.89 |
| V248G | 6438.97 | 6744.48 | 0.95 | 0.88 | 0.87 |
| V248C | 3692.16 | 3816.99 | 0.97 | 0.51 | 0.49 |
| V248R | 7253.81 | 7153.37 | 1.01 | 1.00 | 0.92 |
| V248A | 8420.73 | 7739.03 | 1.09 | 1.16 | 0.99 |
| V248H | 8578.28 | 7867.88 | 1.09 | 1.18 | 1.01 |
| V248I | 8473.10 | 8209.35 | 1.03 | 1.16 | 1.05 |
| V248T | 8100.54 | 7751.03 | 1.05 | 1.11 | 1.00 |
| V248K | 7147.53 | 7653.87 | 0.93 | 0.98 | 0.98 |
| V248S | 6899.65 | 6729.67 | 1.03 | 0.95 | 0.86 |
| V248F | 6736.68 | 6651.01 | 1.01 | 0.92 | 0.85 |
| V248E | 9210.34 | 8235.44 | 1.12 | 1.01 | 1.08 |
| Q249T | 6909.47 | 7370.27 | 0.94 | 0.95 | 0.95 |
| Q249W | 10145.55 | 8691.89 | 1.17 | 1.39 | 1.12 |
| Q249R | 7102.73 | 7103.74 | 1.00 | 0.97 | 0.91 |
| Q249E | 3987.22 | 7583.88 | 0.53 | 0.55 | 0.97 |
| Q249A | 8992.77 | 8414.65 | 1.07 | 1.23 | 1.08 |
| Q249P | 8376.56 | 8108.11 | 1.03 | 1.15 | 1.04 |
| Q249C | 5978.93 | 5496.03 | 1.09 | 0.82 | 0.71 |
| Q249G | 7612.71 | 7662.25 | 0.99 | 1.04 | 0.98 |
| Q249N | 7180.54 | 7257.66 | 0.99 | 0.99 | 0.93 |
| Q249K | 7772.72 | 7296.54 | 1.07 | 1.07 | 0.94 |
| Q249I | 7262.56 | 7159.06 | 1.01 | 1.00 | 0.92 |
| Q249Y | 6047.16 | 6053.08 | 1.00 | 0.83 | 0.78 |
| Q249V | 8717.93 | 8059.04 | 1.08 | 1.20 | 1.04 |
| Q249L | 6532.65 | 6824.78 | 0.96 | 0.90 | 0.88 |
| Q249H | 8441.70 | 7557.69 | 1.12 | 1.16 | 0.97 |
| P250L | 9455.47 | 8580.12 | 1.10 | 1.30 | 1.10 |
| P250S | 7684.90 | 7513.77 | 1.02 | 1.05 | 0.97 |
| P250R | 7701.81 | 7566.23 | 1.02 | 1.06 | 0.97 |
| P250Y | 7886.68 | 7534.22 | 1.05 | 1.08 | 0.97 |
| P250M | 8416.52 | 8221.73 | 1.02 | 1.15 | 1.06 |
| P250F | 8150.35 | 7703.24 | 1.06 | 1.12 | 0.99 |
| P250A | 8963.20 | 8460.94 | 1.06 | 1.23 | 1.09 |
| P250K | 7830.18 | 7732.04 | 1.01 | 1.07 | 0.99 |
| P250G | 7623.88 | 7834.34 | 0.97 | 1.05 | 1.01 |
| P250N | 7600.44 | 7961.88 | 0.95 | 1.04 | 1.02 |
| P250T | 1147.37 | 1489.99 | 0.77 | 0.16 | 0.19 |
| P250W | 7431.76 | 7755.84 | 0.96 | 1.02 | 1.00 |
| P250D | 7767.77 | 7525.09 | 1.03 | 1.07 | 0.97 |
| P250V | 7355.32 | 7719.82 | 0.95 | 1.01 | 0.99 |
| P250Q | 7797.52 | 8203.80 | 0.95 | 1.07 | 1.05 |
| I251A | 4953.41 | 8984.79 | 0.55 | 0.48 | 0.96 |
| I251Q | 10910.92 | 9221.40 | 1.18 | 1.07 | 0.98 |
| I251G | 11041.83 | 9640.57 | 1.15 | 1.08 | 1.03 |
| I251L | 11028.53 | 9408.72 | 1.17 | 1.08 | 1.00 |
| I251K | 11050.61 | 9421.73 | 1.17 | 1.08 | 1.01 |
| I251R | 10950.25 | 9220.62 | 1.19 | 1.07 | 0.98 |
| I251E | 10262.05 | 9115.62 | 1.13 | 1.00 | 0.97 |
| I251D | 10582.82 | 9557.71 | 1.11 | 1.04 | 1.02 |
| I251T | 10884.22 | 9485.20 | 1.15 | 1.06 | 1.01 |
| I251C | 10348.04 | 9428.04 | 1.10 | 1.01 | 1.01 |
| I251Y | 10319.00 | 9450.22 | 1.09 | 1.01 | 1.01 |
| I251P | 10762.38 | 9410.57 | 1.14 | 1.05 | 1.00 |
| I251S | 8445.88 | 7160.96 | 1.18 | 1.07 | 0.96 |
| I251W | 7305.95 | 6974.26 | 1.05 | 0.92 | 0.93 |
| I251V | 8343.83 | 7350.61 | 1.14 | 0.91 | 0.98 |
| G252F | 7921.80 | 7529.24 | 1.05 | 1.09 | 0.97 |
| G252W | 6989.36 | 7313.18 | 0.96 | 0.96 | 0.94 |
| G252A | 8567.46 | 8300.90 | 1.03 | 1.18 | 1.07 |
| G252R | 7756.55 | 7447.08 | 1.04 | 1.06 | 0.96 |
| G252L | 8684.63 | 8094.21 | 1.07 | 1.19 | 1.04 |
| G252E | 7651.86 | 7211.52 | 1.06 | 1.05 | 0.93 |
| G252D | 7977.50 | 7049.47 | 1.13 | 1.09 | 0.91 |
| G252K | 9685.27 | 8502.04 | 1.14 | 1.33 | 1.09 |
| G252S | 7596.71 | 6986.94 | 1.09 | 1.04 | 0.90 |
| G252T | 7242.98 | 7147.95 | 1.01 | 0.99 | 0.92 |
| G252P | 8175.79 | 8226.12 | 0.99 | 1.12 | 1.06 |
| G252H | 8030.53 | 7802.24 | 1.03 | 1.10 | 1.00 |
| G252C | 5540.29 | 5421.44 | 1.02 | 0.76 | 0.70 |
| G252V | 7910.50 | 7997.71 | 0.99 | 1.09 | 1.03 |
| G252I | 7702.75 | 7964.05 | 0.97 | 1.06 | 1.02 |
| P253C | 7906.13 | 8213.73 | 0.96 | 0.99 | 1.04 |
| P253G | 9640.00 | 8446.66 | 1.14 | 1.20 | 1.07 |
| P253Q | 9482.36 | 8631.24 | 1.10 | 1.18 | 1.09 |
| P253I | 6906.18 | 7721.21 | 0.89 | 0.86 | 0.97 |
| P253L | 8851.11 | 8489.29 | 1.04 | 1.10 | 1.07 |
| P253R | 9020.78 | 8580.86 | 1.05 | 1.12 | 1.08 |
| P253A | 8697.23 | 8410.29 | 1.03 | 1.08 | 1.06 |
| P253E | 9074.45 | 8476.99 | 1.07 | 1.13 | 1.07 |
| P253Y | 7935.28 | 8171.53 | 0.97 | 0.99 | 1.03 |
| P253W | 6635.85 | 7293.26 | 0.91 | 0.83 | 0.92 |
| P253M | 6895.66 | 7648.23 | 0.90 | 0.86 | 0.96 |
| P253V | 7058.87 | 7756.04 | 0.91 | 0.88 | 0.98 |
| P253T | 6728.25 | 7541.00 | 0.89 | 0.84 | 0.95 |
| P253K | 6929.49 | 7400.65 | 0.94 | 0.86 | 0.93 |
| P253N | 7354.73 | 7533.05 | 0.98 | 0.92 | 0.95 |
| Q254R | 9454.92 | 8474.29 | 1.12 | 1.18 | 1.07 |
| Q254G | 3549.45 | 3806.63 | 0.93 | 0.44 | 0.48 |
| Q254W | 3389.45 | 3326.38 | 1.02 | 0.42 | 0.42 |
| Q254T | 7491.28 | 7853.86 | 0.95 | 0.93 | 0.99 |
| Q254A | 7226.25 | 7451.70 | 0.97 | 0.90 | 0.94 |
| Q254F | 6263.95 | 6007.53 | 1.04 | 0.78 | 0.76 |
| Q254D | 9098.08 | 8154.92 | 1.12 | 1.13 | 1.03 |
| Q254P | 6827.99 | 7340.40 | 0.93 | 0.85 | 0.93 |
| Q254L | 7602.15 | 7940.64 | 0.96 | 0.95 | 1.00 |
| Q254C | 9284.18 | 8479.77 | 1.09 | 1.16 | 1.07 |
| Q254Y | 8847.02 | 7831.28 | 1.13 | 1.10 | 0.99 |
| Q254I | 9340.36 | 8662.75 | 1.08 | 1.16 | 1.09 |
| Q254E | 9466.76 | 8516.08 | 1.11 | 1.18 | 1.07 |
| Q254V | 9803.92 | 8575.31 | 1.14 | 1.22 | 1.08 |
| Q254S | 7768.13 | 8801.19 | 0.88 | 1.15 | 1.17 |
| T255I | 9880.58 | 8415.65 | 1.17 | 1.23 | 1.06 |
| T255Q | 9537.20 | 8410.86 | 1.13 | 1.19 | 1.06 |
| T255P | 7468.08 | 7296.37 | 1.02 | 0.93 | 0.92 |
| T255R | 5740.42 | 4974.50 | 1.15 | 0.72 | 0.63 |
| T255C | 2626.79 | 2503.21 | 1.05 | 0.33 | 0.32 |
| T255N | 5128.08 | 4479.75 | 1.14 | 0.64 | 0.57 |
| T255S | 7334.60 | 6905.71 | 1.06 | 0.91 | 0.87 |
| T255V | 5463.42 | 5187.78 | 1.05 | 0.68 | 0.65 |
| T255E | 7691.31 | 7194.23 | 1.07 | 0.96 | 0.91 |
| T255G | 8166.77 | 7682.14 | 1.06 | 1.02 | 0.97 |
| T255K | 6636.15 | 5647.18 | 1.18 | 0.83 | 0.71 |
| T255A | 4436.98 | 4322.98 | 1.03 | 0.55 | 0.55 |
| T255F | 3562.89 | 3107.64 | 1.15 | 0.44 | 0.39 |
| T255L | 4904.06 | 4266.71 | 1.15 | 0.61 | 0.54 |
| T255H | 8243.01 | 7352.60 | 1.12 | 1.22 | 0.98 |
| P256S | 10876.81 | 9018.60 | 1.21 | 1.36 | 1.14 |
| P256V | 10408.68 | 8594.11 | 1.21 | 1.30 | 1.08 |
| P256F | 6020.49 | 5181.94 | 1.16 | 0.75 | 0.65 |
| P256Y | 10270.90 | 8699.77 | 1.18 | 1.28 | 1.10 |
| P256I | 9089.54 | 7980.23 | 1.14 | 1.13 | 1.01 |
| P256A | 9426.67 | 8868.67 | 1.06 | 1.18 | 1.12 |
| P256L | 8342.08 | 7217.69 | 1.16 | 1.04 | 0.91 |
| P256G | 4631.84 | 4679.24 | 0.99 | 0.58 | 0.59 |
| P256N | 4406.75 | 3946.90 | 1.12 | 0.55 | 0.50 |
| P256R | 4975.17 | 4155.27 | 1.20 | 0.62 | 0.52 |
| P256Q | 6177.77 | 5546.92 | 1.11 | 0.77 | 0.70 |
| P256E | 9266.75 | 8366.07 | 1.11 | 1.16 | 1.06 |
| P256K | 5919.72 | 5928.31 | 1.00 | 0.74 | 0.75 |
| P256M | 8787.02 | 8554.52 | 1.03 | 1.10 | 1.08 |
| P256C | 4674.45 | 4633.67 | 1.01 | 0.69 | 0.62 |
| K257C | 4327.83 | 4267.45 | 1.01 | 0.54 | 0.54 |
| K257M | 5985.85 | 5236.20 | 1.14 | 0.75 | 0.66 |
| K257V | 7316.42 | 7115.65 | 1.03 | 0.91 | 0.90 |
| K257A | 9355.23 | 8528.52 | 1.10 | 1.17 | 1.08 |
| K257E | 10237.19 | 9141.73 | 1.12 | 1.28 | 1.15 |
| K257S | 9952.97 | 8464.79 | 1.18 | 1.24 | 1.07 |
| K257L | 10053.73 | 8711.61 | 1.15 | 1.25 | 1.10 |
| K257I | 8609.80 | 7806.76 | 1.10 | 1.07 | 0.98 |
| K257G | 8280.79 | 7718.36 | 1.07 | 1.03 | 0.97 |
| K257N | 8528.22 | 7707.49 | 1.11 | 1.06 | 0.97 |
| K257F | 7720.51 | 6633.90 | 1.16 | 0.96 | 0.84 |
| K257W | 7039.69 | 7120.56 | 0.99 | 0.88 | 0.90 |
| K257R | 9688.77 | 9114.18 | 1.06 | 1.21 | 1.15 |
| K257P | 8039.60 | 7464.88 | 1.08 | 1.19 | 0.99 |
| K257T | 9346.88 | 8849.42 | 1.06 | 1.39 | 1.18 |
| A258Q | 7000.31 | 6977.33 | 1.00 | 0.87 | 0.88 |
| A258Y | 6636.02 | 5998.83 | 1.11 | 0.83 | 0.76 |
| A258W | 9438.05 | 8527.86 | 1.11 | 1.18 | 1.08 |
| A258G | 7204.05 | 7778.97 | 0.93 | 0.90 | 0.98 |
| A258L | 1222.62 | 1226.40 | 1.00 | 0.15 | 0.15 |
| A258F | 9548.91 | 8531.04 | 1.12 | 1.19 | 1.08 |
| A258M | 8161.79 | 8061.20 | 1.01 | 1.02 | 1.02 |
| A258N | 7808.83 | 6968.56 | 1.12 | 0.97 | 0.88 |
| A258V | 8395.80 | 8391.43 | 1.00 | 1.05 | 1.06 |
| A258T | 8674.71 | 7958.00 | 1.09 | 1.08 | 1.00 |
| A258I | 8452.43 | 7509.34 | 1.13 | 1.05 | 0.95 |
| A258D | 7741.51 | 6346.88 | 1.22 | 0.97 | 0.80 |
| A258R | 9008.56 | 7908.51 | 1.14 | 1.12 | 1.00 |
| A258E | 10198.40 | 8709.16 | 1.17 | 1.27 | 1.10 |
| A258P | 10414.06 | 9178.82 | 1.13 | 1.55 | 1.22 |

[0550] From the initial screen, twenty-six mutants were selected as primary candidates for further evaluation based on decreased catalytic activity at 37° C. relative to 25° C. and/or sufficient protein expression or activity (Table 11). In Table 11, the positions indicated are with respect to positions corresponding to amino acid residues of hMMP-1 set forth in SEQ ID NO:2.

TABLE 11
Selected Positions for Generating Combinatorial Library

| | | | |
|---|---|---|---|
| L95K | D105I | D105N | D105L |
| D105A | D105G | R150P | D156R |
| D156H | D156K | D156T | G159V |
| G159T | D179N | E180T | E180F |
| E182T | T185Q | N187I | A198L |
| S208K | I213G | G214E | V227E |
| I234E | I240S | | |

[0551] C. Combinatorial MMP-1 Library

[0552] A combinatorial hMMP-1 variant library of double mutants containing two mutations from among L95K, D105N, R150P, D156K, D156T, G159V, D179N, E180T, A198L, V27E and 1240S, with reference to positions set forth in SEQ ID NO:2, was generated as described in U.S. Published Application No. 2010/0284995. The library was generated to theoretically contain every possible combination of amino acid variants for each of the selected mutants. The constructed library (designated CPS library) contained a total of 1238 mutants, including the wild-type and 9 single amino acid hits, which was 81% of the maximal diversity. The generated library of combinatorial mutants was screened as described in subsection B above. Identified candidates based on decreased catalytic activity at 37° C. relative to 25° C. and/or sufficient protein expression or activity are set forth in Table 12. All of the mutants tested exhibited less activity than wild-type at the corresponding temperature, although many exhibited substantial activity.

TABLE 12
Activity of Selected Mutants from Combinatorial Library

| | | | | 25° C.: | 37° C.: |
|---|---|---|---|---|---|
| | | | Ratio | % Act. | % Act. |
| | Avg. RFU | Avg. RFU | (25° C./ | of wt | of wt |
| Variant | 25° C. | 37° C. | 37° C.) | 25° C. | 25° C. |
| D156K/G159V/ | 1261.31 | 786.28 | 1.60 | 4.73 | 2.95 |
| D179N | | | | | |
| R150P/V227E | 1801.03 | 859.01 | 2.10 | 6.44 | 3.07 |
| D156T/V227E | 2021.29 | 864.71 | 2.34 | 7.22 | 3.09 |
| G159V/A198L | 1684.53 | 863.78 | 1.95 | 6.06 | 3.11 |
| D105N/A198L | 1422.45 | 919.80 | 1.55 | 5.34 | 3.45 |
| L95K | 1389.81 | 969.67 | 1.43 | 5.00 | 3.49 |
| D179N/V227E | 1446.86 | 948.41 | 1.53 | 5.43 | 3.56 |
| A198L/V227E | 2740.04 | 1036.69 | 2.64 | 9.79 | 3.70 |
| E180T/V227E | 2549.76 | 1038.44 | 2.46 | 9.11 | 3.71 |
| D179N/A198L | 1411.89 | 968.14 | 1.46 | 5.45 | 3.74 |
| D156K/D179N | 1227.63 | 973.51 | 1.26 | 4.74 | 3.76 |
| D105N/R150P/ | 1668.82 | 1002.65 | 1.66 | 6.26 | 3.76 |
| D156K/G159V/ | | | | | |
| D179N/E180T | | | | | |
| D105N/R150P/ | 1846.75 | 1003.36 | 1.84 | 6.93 | 3.76 |
| E180T | | | | | |
| G159V/I240S | 2565.48 | 1031.27 | 2.49 | 9.45 | 3.80 |
| D156T/D179N/ | 1326.33 | 774.68 | 1.71 | 6.53 | 3.81 |
| I240S | | | | | |
| D156T/G159V | 1521.88 | 1048.30 | 1.45 | 5.71 | 3.93 |
| R150P/E180T | 1636.14 | 1112.37 | 1.47 | 5.85 | 3.98 |
| D156T/D179N | 3855.30 | 1049.65 | 3.67 | 14.72 | 4.01 |
| D179N/I240S | 1890.16 | 826.28 | 2.29 | 9.30 | 4.07 |
| L95K/D156T/ | 2075.52 | 1194.20 | 1.74 | 7.79 | 4.48 |
| D179N | | | | | |
| D156T | 5564.55 | 1304.31 | 4.27 | 26.15 | 6.13 |
| G159V | 6330.31 | 1716.35 | 3.49 | 24.17 | 6.94 |
| G159V/D179N | 4741.70 | 1896.45 | 2.50 | 17.79 | 7.12 |
| A198L | 4888.05 | 1555.23 | 3.14 | 22.97 | 7.31 |
| L95K/D105N/ | 3640.58 | 2177.79 | 1.67 | 13.66 | 8.17 |
| E180T | | | | | |
| R150P/D156T/ | 2554.33 | 1770.29 | 1.44 | 12.00 | 8.32 |
| A198L | | | | | |
| V227E | 21170.85 | 2439.36 | 9.01 | 76.14 | 8.45 |
| I240S | 5525.59 | 1486.79 | 3.72 | 33.21 | 8.94 |
| L95K/D105N/ | 2930.99 | 2217.79 | 1.32 | 14.58 | 11.03 |
| R150P/D156T/ | | | | | |
| G159V/A198L/ | | | | | |
| V227E/I240S | | | | | |
| L95K/R150P | 6360.67 | 3108.26 | 2.05 | 30.68 | 14.99 |
| D105N/E180T | 13018.08 | 4994.85 | 2.61 | 46.52 | 17.85 |
| R150P | 11979.01 | 4261.20 | 2.81 | 56.29 | 20.02 |
| D105N | 12356.79 | 4628.13 | 2.67 | 58.06 | 21.75 |
| E180T | 26456.92 | 11205.01 | 2.36 | 94.55 | 40.04 |
| Wild-type | 26316.84 | 22348.45 | 1.18 | 94.64 | 80.37 |

[0553] In addition, a library of double mutants was generated, whereby mutations S208K, I213G and G214E were combined with each of the mutations L95K, D105N, R150P, D156K, D156T, G159V, D179N, E180T, A198L, V27E and 1240S. Six (6) double mutants were identified based on decreased catalytic activity at 37° C. relative to 25° C. and/or sufficient protein expression or activity. The double mutants, and their ratio of activity (25° C./37° C.), were as follows: almost 14-fold for the S208K/G159V mutant; about 14-fold for the S208K/D179N mutant; about 13-fold for the S208K/C227E mutant; about 8-fold for the G214E/G159V mutant; almost 14-fold for the G214E/D179N mutant; and about 14-fold for the 1213G/D179N mutant. As expected, wild-type hMMP-1 exhibited a ratio of activity of about 1-fold.

### Example 2

### Expression, Purification and Activation of Wild-Type or Mutant MMP-1

[0554] A. Expression in E. coli

[0555] DNA encoding Wild-type hMMP-1 (clone BAP006_{—}10, having a sequence of nucleotides set forth as nucleotides in SEQ ID NO:3) or encoding a mutant MMP-1 was subcloned into vector pET26b (EMD Biosciences, Catalog No. 69862; SEQ ID NO:131) by ligation using standard molecular biology techniques. The pET26b carries an N-terminal pelB signal sequence (set forth in SEQ ID NO:130) for periplasmic localization. For protein expression, the vector was transformed into BL21 (DE3) E. coli cells (NEB) using manufacturers recommendations.

[0556] B. Large Scale Purification

[0557] A transformed colony was used to inoculate 50 mL LB medium containing Kanamycin. The culture was grown at 37° C. with shaking overnight. The next day, 15 mL of the overnight culture were used to innoculate 0.8 L of LB media with Kanamycin (50 μg/mL final concentration) in a 2-L flask. A total of 4 2-L flasks were grown for each clone. The cultures were grown at 37° C., shaking at 250 rpm, until the cultures reached an OD600 of 0.8. MMP-1 expression was then induced with 0.4 mM IPTG. The cultures were kept at 4° C. for 1 hour, followed by overnight growth at 25° C. The following day, the cells were harvested by centrifugation (20 minutes at 3000×g), and the pellets were resuspended in 5% culture volume of buffer I (200 mM Tris/HcL pH7.5, 20% sucrose, 1 mM EDTA). Lysozyme (0.5 mg/mL) was added to the suspension, which was then incubated at room temperature for 30 min, while shaking. An equal volume of ice cold ddH₂O was added to the lysate, followed by incubation on ice for 20 min. The lysate was then centrifuged at 6000×g for 30 min to pellet cell debris.

[0558] Q-sepharose beads (50% of supernatant volume) were washed with 10×CV (column volume) of Q-bind buffer. The lysate supernatant was added to the washed Q-sepharose beads, and incubated at 4° C. for 1 hr, while stirring. The supernatant flow-through (FT) was collected after passing through a 0.22 μm filter. The Q-sepharose beads were then washed with 2×CV of Q-bind buffer. The washes were collected, combined with the FT, and loaded onto a pre-equilibrated 5-mL Sepharose Fast Flow column (GE Healthcare). Bound protein was eluted twice from the column with Buffer A (25 mM Tris-HCl, pH 7.5, 75 mM NaCl, 10 mM CaCl₂) and Buffer B (25 mM Tris-HCl, pH 7.5, 1 M NaCl, 10 mM CaCl₂), over the following gradient: 0%, 1×CV; 0-10% Buffer B, 10×CV; 10-70% Buffer B, 15×CV. The fractions of eluate containing the MMP-1 peak were pooled and diluted 1:8 in 25 mM Tris-HCl, pH7.5, 50 mM NaCl, 5 mM CaCl₂ and 0.05% Brij-35.

[0559] C. Activation

[0560] Purified full length MMP-1 (wild-type or mutant) was activated by proteolytic cleavage using immobilized trypsin, whereby trypsin from bovine pancreas treated with L-1-tosylamido-2-phenylethyl chloromethyl ketone (TPCK) to inhibit contaminating chymotrypsin is immobilized to 4% beaded agarose (Catalog No. 20230; Thermo Scientific Pierce; Rockford, Ill.). Two hundred (200) μL of the immobilized TPCK trypsin slurry was washed three times with 1 mL of TCN buffer (50 mM Tris pH 7.5, 150 mM NaCl, 10 mM CaCl₂). The trypsin beads were then mixed with 1 mL of purified MMP-1 mutant (approximately 3 mg/mL) and incubated for two hours at room temperature with rotation. Activated MMP-1 or mutant was separated from the trypsin beads by using a 7 kDa or 40 kDa molecular weight cut-off (MWCO) Zeba desalt spin column (Thermo Scientific). The concentration of the activated protein was determined by OD280 and the extinction of coefficient of the proteins.

[0561] To confirm that the pro-domain of the enzyme was cleaved through the trypsin activation step, untreated enzyme and trypsin-treated enzyme were visualized on a 4-20% SDS-PAGE gel followed by Coomassie blue staining. The untreated protein had an apparent molecular weight of 57 kDa whereas the trypsin-treated enzyme had an apparent molecular weight of approximately 43 kDa. In addition to the activated protein, two other proteins near the 22 kDa marker were visualized in trypsin-treated samples, which, based on N-terminal sequencing, were determined to be the catalytic and hemopexin domains. These were probably generated by autocleavage in the linker region.

[0562] D. In Vitro MMP-1 Activity

[0563] Once activated, MMP-1 (wild-type or mutant) also was assayed against a fluorogenic peptide substrate to determine its activity. The assay to assess activity monitors the rate of fluorescence production as a result of cleavage of the commercially available fluorogenic substrate, peptide IX, designated as Mca-K-P-L-G-L-Dpa-A-R-NH₂ (SEQ ID NO:88; Mca=(7-methoxycoumarin-4-yl)acetyl; Dpa=N-3-(2,4,-dinitrophenyl)-L-2,3-diaminopropionyl; R&D Systems, Minneapolis, Minn., Cat#ES010). The peptide substrate contains a highly fluorescent 7-methoxycoumarin group that is quenched by resonance energy transfer to the 2,4-dinitrophenyl group. Activated hMMP-1 cleaves the amide bond between glycine and leucine resulting in an increase in released fluorescence. Briefly, 1.6 μL of TCNB (50 nM Tris, 10 mM CaCl₂, 150 mM NaCl, 0.05% Brij 35, pH 7.5) containing 620 μM peptide IX fluorescent substrate were added to each well to a final concentration of 10 μM, followed immediately by detection of the rate of fluorescence production (relative fluorescence units (RFU)/sec) in a SpectraMax M3 fluorescent plate reader (Molecular Devices) at 320 nm exitation/405 nm emission in kinetic mode.

[0564] The results show that activated MMP-1 exhibited extensive activity against the peptide substrate that was about 78 times more active than the non-trypsin activated full-length MMP-1 containing the pro-domain. The result was similar for tested mutants (e.g., the GVSK mutant, G159V/S208K). This result further confirms that the change in molecular weight of the protein resulted in an active protein.

### Example 3

### Effect of Ca²⁺ Concentration on Activity of Selected Mutants

[0565] From the mutants identified in Table 11 above, it was observed that many obtained mutations at or near residues involved in metal binding. Mutants were selected that contained a point mutation(s) located in amino acids that were either directly involved in or adjacent to amino acids that participate in the coordination of calcium or zinc ions in order to assess the effects of calcium concentration on activity. A representative mutant was selected that has a glycine to a valine mutation at amino acid 159, which is a residue directly involved in Ca²⁺ coordination, and a serine to lysine mutation at amino acid 208, which is a residue adjacent to an amino acid involved in the binding of the catalytic Zn²⁺ molecule (G159V/S208K; GVSK, set forth in SEQ ID NO:155). Other mutants, D156T/D179N (SEQ ID NO:156) and V227E (SEQ ID NO:157), and single mutants G159V (SEQ ID NO:158) and S208K (SEQ ID NO:159), also were tested for increased calcium dependent activity.

[0566] A. GVSK Mutant, G159V/S208K

[0567] 1. MMP-1 Activity as a Function of Calcium Concentration

[0568] MMP-1 and MMP-1 mutant GVSK (G159V/S208K), purified and activated as described in Example 2, were tested in vitro for catalytic activity against the fluorescent peptide substrate IX as a function of Ca²⁺ concentration. Purified and activated MMP-1 or GVSK (G159V/S208K) was diluted with TCN buffer (50 mM Tris pH 7.5, 150 mM NaCl) containing either 1, 2, 5, or 10 mM Ca²⁺ to a concentration of 1 μg/mL. From this concentration, a series of seven, three fold serial dilutions were then made. One hundred (100) μL of each sample was then added to a 96 well Fluotrac 200 black plate (Greiner Bio-One) containing 5 μL of the fluorogenic substrate peptide IX substrate as described in Example 2C (at a final concentration of 200 μm). The enzyme and substrate were incubated at 37° C. for 2 hours. The rate of fluorescence was measured using a SpectraMax M3 fluorescent plate reader (Molecular Devices) in kinetic mode at an excitation wavelength of 320 nm and an emission wavelength of 405 nm immediately after the samples were added to the peptide IX substrate and 2 hours after the addition of sample. Activity was depicted as specific activity (RFU/min/ng). Each sample was measured in duplicate and the activity was calculated by averaging the readings for each sample within the linear range of the assay.

[0569] The results show that wild-type MMP-1 had substantially similar specific activities at the varying concentrations of Ca²⁺ ranging from about 8.0 to 10.0 RFU/min/ng. The highest specific activity of about 10.0 RFU/min/ng for wild-type MMP-1 was seen at Ca²⁺ concentrations of 1 and 2 mM. For the GVSK mutant G159V/S208K, the highest activity was observed in the presence of 10 mM Ca²⁺, although the observed activity was reduced by about 25% compared to wild-type MMP-1 in the presence of 10 mM Ca²⁺ with GVSK (G159V/S208K) having a specific activity of about 6.0 RFU/min/ng and wild-type MMP-1 having a specific activity of about 8.0 RFU/min/ng. The results show that the GVSK (G159V/S208K) mutant had decreased activity at decreasing concentrations of Ca²⁺. The activity decreased at lower calcium concentrations. At 2 mM Ca²⁺, the specific activity of the GVSK (G159V/S208K) mutant was decreased 3-fold compared to its activity at 10 mM Ca²⁺. As the concentration further decreased to 1 mM, the activity of the GVSK (G159V/S208K) mutant decreased approximately 10-fold compared to its activity at 10 mM Ca²⁺.

[0570] The experiment also was performed by incubating the enzyme and substrate at 25° C. instead of 37° C. The results were generally similar, except that the results showed that the GVSK (G159V/S208K) mutant lost less activity at 25° C. compared to at 37° C. For example, in the presence of 1 mM Ca²⁺, the GVSK (G159V/S208K) mutant lost only about half of its activity compared to its activity in the presence of 10 mM Ca²⁺ when tested at 25° C. Thus, the results show that temperature and Ca²⁺ concentration both had an effect on activity.

[0571] 2. Time Course of MMP-1 Activity in Presence of Calcium

[0572] The calcium-dependent activity of activated GVSK (G159V/S208K) as compared to activated wild-type MMP-1 was further characterized by assaying the activity as a function of time and calcium concentration. Enzyme activity was examined using the same fluorometric assay as described above. Briefly, purified and activated MMP-1 or GVSK (G159V/S208K) was diluted with TCN buffer (50 mM Tris pH 7.5, 150 mM NaCl) containing either 1 or 10 mM Ca²⁺ to a concentration of 1 μg/mL. From this concentration, a series of seven, three fold serial dilutions were then made. 100 μL of each sample was then added to a 96 well Fluotrac 200 black plate (Greiner Bio-One) containing 5 μL of a 200 μm final concentration fluorogenic substrate. The enzyme and substrate were incubated at 37° C., and the plates were read just after addition and 15, 60, 90, and 180 minutes later using a SpectraMax M3 fluorescent plate reader (Molecular Devices). Activity was depicted as specific activity (RFU/min/ng). Relative fluorescence units (RFU) were determined at an excitation wavelength of 320 nm and an emission wavelength of 405 nm.

[0573] The results show that the activity of wild-type MMP-1 at 37° C. at 10 mM calcium concentration increased slightly at the early time points with a specific activity of almost 4 RFU/min/ng immediately after addition of sample to substrate, increasing to about 5 RFU/min/ng at 60 and 90 minutes after addition of sample to substrate. Then, at later time points up until 180 minutes after addition of sample to substrate the specific activity decreased and was similar to the starting activity. Similar results were generally observed at the 1 mM calcium concentration, although the observed specific activity was slightly less than at the higher concentration of calcium. For example, for wild-type MMP-1, the specific activity measured immediately after addition of sample to substrate incubated in the presence of 10 mM Ca²⁺ was about 4.0 RFU/min/ng, whereas it was about 3.0 RFU/min/ng in the presence of 1 mM Ca²⁺.

[0574] As above, the highest activity of the GVSK (G159V/S208K) mutant was observed at the 10 mM higher concentration of Ca²⁺, although it was slightly less than wild-type MMP-1. For example, for wild-type MMP-1, the specific activity measured immediately after addition of sample to substrate incubated in the presence of 10 mM Ca²⁺ was about 4.0 RFU/min/ng, whereas it was about 3.5 RFU/min/ng for the GVSK (G159V/S208K) mutant. At the higher concentration of Ca²⁺, the GVSK (G159V/S208K) mutant showed the same general temporal pattern of activity as wild-type MMP-1, although the increase in fluorescence at earlier times was less than for the wild-type MMP-1. This result shows that for the GVSK (G159V/S208K) mutant there was no loss of activity during the course of the experiment at 10 mM Ca²⁺. In contrast, GVSK (G159V/S208K) in low calcium of 1 mM had a lower starting specific activity of only about 2.0 RFU/min/ng, which decreased a further 2-fold after 15 minute incubation with substrate. The loss of activity continued over time and by 180 minutes there was almost no detectable activity measured for the GVSK (G159V/S208K) mutant in the presence of 1 mM calcium.

[0575] 3. Kinetics of MMP-1 Activity in Presence of Calcium

[0576] The calcium-dependent activity of activated GVSK (G159V/S208K) as compared to activated wild-type MMP-1 was further characterized by determining the enzyme kinetics of the two enzymes as a function calcium concentration. Purified MMP-1 and GVSK, at a concentration of 5 nM were incubated with a series of two-fold dilutions (0.95-62 μM final concentration) of fluorogenic peptide substrate IX in either 1 or 10 mM CaCl₂ TCN buffer. One hundred μL reactions were incubated at 37° C. in a 96-well Fluotrac 200 black plate. Plates were read using the SpectraMax M3 fluorescent plate reader (Molecular Devices) using an excitation wavelength of 320 nm and an emission wavelength of 405 nm. The conversion factor (i.e., complete hydrolysis) was obtained by incubation of the fluorescent substrate with 0.25 μM MMP-1 for 24 hours at 25° C. Hydrolysis rates were obtained from fluorescence versus time plots using data points from the linear portion of the curve. The slope of these plots was divided by the fluorescence change corresponding to complete hydrolysis and then multiplied by the substrate concentration to obtain hydrolysis rates in μM s⁻¹. Kinetic parameters were obtained by Lineweaver-Burk, Eadie-Hofstee, and Hanes-Woolf analysis. Each experiment was performed three times and each sample assayed in duplicate. The results are set forth in Table 13 below.

TABLE 13
Enzyme Kinetics of Tested Mutants

| Sample | [Ca²⁺] mM | k_{cat} (s⁻¹) | K_{M} (μM) | k_{cat}/K_{M} (s⁻¹ M⁻¹) |
|---|---|---|---|---|
| MMP-1 | 10 | 4.54 ± 1.49 | 21.13 ± 7.00 | 216,000 ± 41,500 |
| MMP-1 | 1 | 5.34 ± 2.07 | 20.57 ± 5.35 | 254,000 ± 52,400 |
| GVSK | 10 | 2.97 ± 1.00 | 11.0 ± 2.56 | 265,800 ± 44,600 |
| GVSK | 1 | 2.26 ± 0.64 | 16.53 ± 3.47 | 135,300 ± 15,600 |

[0577] The results show that wild-type MMP-1 exhibits similar enzyme kinetics whether in the presence of high (10 mM) or low (1 mM) concentrations of Ca²⁺. In contrast, GVSK (G159V/S208K) kinetics are highly dependent on calcium concentration. For example, the specificity constant (k_{cat}/K_{M}), used to represent catalytic efficiency, for GVSK in the presence of 10 mM Ca²⁺ is similar to those of wild-type MMP-1 in the presence of either 1 mM or 10 mM Ca²⁺. However, in the presence of 1 mM Ca²⁺, GVSK has a specificity constant that is approximately half that of GVSK in the presence of 10 mM Ca²⁺. The reduced catalytic efficiency of GVSK in buffer containing 1 mM Ca²⁺ can be attributed to the reduced affinity of GVSK for the substrate, as indicated by the higher K_{M} value at the lower calcium concentration.

[0578] B. Comparison of Ca²⁺-Dependence of Tested Mutants

[0579] The activity of GVSK (G159V/S208K; SEQ ID NO:155) was compared to other MMP-1 mutants, D156T/D179N (SEQ ID NO:156) and V227E (SEQ ID NO:157), and wild-type MMP-1 (SEQ ID NO:2) following purification and activation as described in Example 2. Activity against the fluorogenic substrate peptide IX was determined as described in above in part A and compared as between and among wild-type MMP-1 and MMP-1 mutants GVSK (G159V/S208K), D156T/D179N and V227E.

[0580] The results are set forth in Table 14. The results show that like GVSK (G159V/S208K), the V227E mutant exhibited calcium-dependent activity in the presence of high calcium compared to low calcium. The activity of the V227E mutant decreased in the presence of 10 mM and 1 mM Ca²⁺ over time to about 60% and about 20%, respectively (activity measured immediately after addition of sample to substrate versus 2 hours after incubation of sample with substrate). The mutant D156T/D179N also exhibited calcium-dependence with higher specific activity measured at 10 mM Ca²⁺ than 1 mM Ca²⁺, although its activity did not change with time at either of the tested concentrations of calcium and in fact slightly increased. The mutants V227E and D156T/D179N, however, exhibited a low level of activity such that their specific activity was barely detectable at any of the time points tested. Thus, the results show that GVSK (G159V/S208K) had the highest specific activity of the mutants tested, as well as a Ca²⁺-dependent and time-dependent activity.

TABLE 14
Calcium-dependence of activity

| | Specific Activity (RFU/min/ng) | | | |
|---|---|---|---|---|
| | Time | | | |
| | immediately after | | 2 hour incubation | |
| | incubation with substrate | | with substrate | |
| [Ca²⁺] (mM) | 10 | 1 | 10 | 1 |
| wild-type | 6.48 | 5.67 | 6.76 | 4.41 |
| GVSK (G159V/S208K) | 7.04 | 2.62 | 7.83 | 0.68 |
| D156T/D179N | 0.22 | 0.06 | 0.29 | 0.10 |
| V227E | 1.60 | 0.77 | 1.04 | 0.12 |

[0581] C. G159V and S208K Single Mutants and Increased Calcium Dependency

[0582] In a further experiment, G159V (SEQ ID NO:158) and S208K (SEQ ID NO:159) single mutants were tested for increased calcium-dependent activity. The G159V and S208K muteins were expressed, purified and activated as described in Example 2. The catalytic activities of the muteins were then determined in the presence of 1 mM and 10 mM Ca²⁺, as described in above in part A, and compared. The S208K mutant demonstrated similar levels of activity at 1 mM and 10 mM Ca²⁺, which was comparable to the behavior of wild-type MMP-1 described in part A above. In contrast, the G159V mutant exhibited increased calcium dependency, exemplified by a decrease in activity of approximately 4-fold in 1 mM Ca²⁺ compared to its activity at 10 mM Ca²⁺. These results show that the calcium sensitivity of the GVSK mutant is likely due to the G159V mutation.

### Example 4

### Effect of Zinc Concentration on Activity of Selected Mutants

[0583] MMP-1 and MMP-1 mutant GVSK (G159V/S208K), purified and activated as described in Example 2, were tested in vitro for catalytic activity against a fluorescent peptide substrate as a function of Zn²⁺ concentration. Purified and activated MMP-1 or GVSK (G159V/S208K) was diluted with TCN buffer (50 mM Tris pH 7.5, 150 mM NaCl) containing either 1 or 10 μM Zn²⁺ and either 1 and 10 mM Ca²⁺. From this concentration, a series of seven, three-fold serial dilutions were then made. One hundred (100) μL of each sample was then added to a 96 well Fluotrac 200 black plate (Greiner Bio-One) containing 5 μL of the fluorogenic substrate peptide 1× substrate as described in Example 2C (at a final concentration of 200 μm). The enzyme and substrate were incubated at 37° C. for 2 hours. Fluorescence was measured using a SpectraMax M3 fluorescent plate reader (Molecular Devices) and relative fluorescence units (RFU) were determined at an excitation wavelength of 320 nm and an emission wavelength of 405 nm immediately after the samples were added to the peptide IX substrate and 2 hours after the addition of sample. Specific activity (RFU/min/ng) was determined. Each sample was measured in duplicate and the activity was calculated by averaging the readings for each sample within the linear range of the assay.

[0584] The results show no difference in the in vitro activity of wild-type MMP-1 or GVSK (G159V/S208K) as a function of the Zn²⁺ concentration in either the 1 or 10 mM Ca²⁺ TCN buffer.

### Example 5

### Assessment of Protein Degradation as a Function of Calcium Concentration

[0585] To determine if the loss of activity in GVSK (G159V/S208K) at low concentrations of calcium was due to autolysis, the degradation of the protein was assessed by visualizing protein fragments by SDS-PAGE.

[0586] 1. GVSK (G159V/S208K) Mutant

[0587] MMP-1 and MMP-1 mutant GVSK (G159V/S208K), purified and activated as described in Example 2, were incubated at a concentration of 0.1 mg/mL in either 1 mM Ca²⁺ or 10 mM Ca²⁺ TCN buffer at 25° C. and 37° C. Samples were collected at 0, 30, 60 and 120 minutes, and reaction conditions were stopped by the addition of gel sample buffer. Samples were placed in 99° C. water for 5 minutes, and then loaded onto a 4-20% SDS polyacrylamide gel followed by Coomassie staining.

[0588] For wild-type MMP-1, clear bands were observed representing active MMP-1 forms after incubation of samples at Ca²⁺ concentrations of 10 mM or 1 mM, and either 25° C. or 37° C., for all collected time points. Thus, the results showed that MMP-1 showed no evidence of degradation, and hence was stable. For the GVSK (G159V/S208K) mutant, clear bands also were observed representing stable, non-degraded protein in samples incubated in 10 mM Ca²⁺, incubated at either 25° C. or 37° C., for all collected time points. Additionally, incubation of the GVSK (G159V/S208K) mutant at Ca²⁺ concentrations of 1 mM and at 25° C. also showed the presence of stable, non-degraded protein. In contrast, incubation of the GVSK (G159V/S208K) MMP-1 mutant in 1 mM Ca²⁺ at 37° C. showed that degradation of protein product had occurred as evidenced by a significant decrease in the band corresponding to the activated form after 30 minutes, which was almost gone after two hours. For the GVSK (G159V/S208K) mutant, Ca²⁺-dependent activity appears to correlate with protein instability.

[0589] 2. Other Tested Mutants

[0590] MMP-1 mutants V227E and D156T/D179N were activated as described in Example 2, except that activation was allowed to proceed for 15 minutes or 60 minutes. Then, unactivated and activated samples were incubated at a concentration of 0.1 mg/mL in either 1 mM Ca²⁺ or 10 mM Ca²⁺ TCN buffer at 37° C. Samples were collected at 0 and 120 minutes, and reaction conditions were stopped by the addition of gel sample buffer. Samples were placed in 99° C. water for 5 minutes, and then loaded onto a 4-20% SDS polyacrylamide gel followed by Coomassie staining.

[0591] The results show that unactivated forms of both mutants exhibited the expected higher molecular weight compared to the activated products. There was no difference in detected protein for either of the unactivated forms at either 1 mM or 10 mM Ca²⁺ showing that Ca²⁺ concentration does not affect degradation of the unactivated forms. Activation of both mutants was observed, based on a decreased size of the protein products, after activation for 15 minutes and 60 minutes. For the D156T/D179N mutant, clear bands were observed representing active MMP-1 forms after incubation of samples at Ca²⁺ concentrations of 10 mM or 1 mM, and the amount of detected protein was not changed after incubation for 2 hours. Thus, the results showed that D156T/D179N mutant showed no evidence of degradation as a function of calcium concentration, and hence was stable. In contrast, the activated form of mutant V227E, like GVSK (G159V/S208K), was degraded upon incubation at 1 mM Ca²⁺, but not 10 mM Ca²⁺, as evidenced by a loss of any detectable protein product after incubation for 2 hours in the presence of 1 mM Ca²⁺. For the V227E mutant, Ca²⁺-dependent activity appears to correlate with protein instability.

### Example 6

### Assessment of Soluble Collagen I Digestion as a Function of Calcium Concentration

[0592] The enzymatic activities of MMP-1 and GVSK (G159V/S208K) were monitored by assessing digestion of soluble collagen I, a physiological substrate of MMP-1. MMP-1 and GVSK (G159V/S208K) at a concentration of 0.1 mg/mL were pre-incubated in TCN buffer for 2 hours with either 1 mM Ca²⁺ or 10 mM Ca²⁺, and at either 25° C. or 37° C. Collagen I isolated from calf skin and labeled with fluorescein isothiocyanate (Elastin Products Company, Inc.) was diluted 10-fold to a final concentration of 0.35 mg/mL with either 10 mM Ca²⁺ TCN buffer or 1 mM Ca²⁺ TCN buffer. After pre-incubation of the enzyme with calcium, 5 μL of enzyme was mixed with 45 μL of the diluted collagen I substrate solution in a total reaction volume of 50 μL at 25° C. for 2 hours. Reaction conditions were stopped by the addition of gel sample buffer. Samples were placed in 99° C. water for 5 minutes, and then loaded onto a 4-20% SDS polyacrylamide gel followed by Coomassie staining.

[0593] Three bands were visualized by Coomassie blue staining for untreated soluble collagen I fraction that was not treated with MMP-1 or GVSK (G159V/S208K) mutant: a high molecular weight band greater than 250 kDa, a doublet having a molecular weight slightly less than 250 kDa and a doublet of about 120 kDa. Treatment of collagen I with wild-type MMP-1 pre-incubated in either 10 mM Ca²⁺ or 1 mM Ca²⁺ and at 25° C. or 37° C. resulted in a new digestion pattern, whereby the three bands seen in the untreated collagen I sample were reduced in molecular weight in addition to the appearance of additional bands of about 50 and 36 kDa. A similar digestion pattern resulted when GVSK (G159V/S208K) was pre-incubated at either 25° C. or 37° C. with 10 mM Ca²⁺ or when GVSK was pre-incubated at 25° C. with 1 mM Ca²⁺. In contrast, when GVSK (0159V/S208K) was pre-incubated at 37° C. in the presence of 1 mM Ca²⁺, the digestion pattern was more similar to the untreated collagen-I molecular weight profile with the three molecular weight bands observed showing that the GVSK was not able to digest soluble collagen Ito any significant extent. The results also showed the minor presence of additional digestion products, but they were not as apparent as in the other enzyme treated samples. The results show that in the presence of low calcium of 1 mM and at 37° C., the ability of the GVSK (G159V/S208K) mutant to digest collagen was abolished, since it was not able to digest collagen I to any significant extent.

### Example 7

### In Vivo Collagen I Degradation by MMP-1 and GVSK (G159V/S208K) Mutant

[0594] To test the in vivo degradation of collagen I, MMP-1 and GVSK (G159V/S208K) mutant enzymes, activated and purified as described in Example 2, were injected into Zucker rat ventral skin. Enzyme activity of perfusates was analyzed by examining collagen I degradation by Western blot.

[0595] Briefly, 6-12 month old male Zucker rats (Harlan labs) were shaved on the ventral surface. Then, rats were perfused with 1 ml TCN buffer (either 1 or 10 mM CaCl₂) containing 1 μg/mL of rHuPH20 (U.S. Pat. No. 7,767,429; prepared from expression in CHO cells of nucleic acid encoding the amino acid sequence set forth in SEQ ID NO:99) and 2.5 μg/mL of epinephrine (Sigma) using a PHD 2000 Infuse/Withdraw Pump (Harvard Apparatus) at a rate of 0.12 mL/min at five different sites or less. After 10 minutes, 1 mL of wild-type MMP-1 or GVSK (G159V/S208K) mutant at a concentration of 50 μg/mL in TCN buffer (either 1 or 10 mM CaCl₂) was perfused at a rate of 0.12 mL/min. As a control, Zucker rat skin was perfused with TCN buffer (1 mM Ca²⁺) without enzyme (vehicle control). At various time points after the start of the second perfusion (2 min, 60 min or 90 min), 1 cm full thickness biopsies of treated sites were taken and fixed in Bousin solution (Sigma) for histology. Perfusate that collected in the area vacated by the biopsied tissue was transferred with a pipette to Eppendorf tubes and kept at −20° C. until further analysis.

[0596] Perfusate was analyzed by Western Blot. Perfusate samples (5-20 μL) containing 4 μg of protein were mixed with gel sample buffer and heated for five minutes at 99° C. All samples were electrophoresed on either 8% or 4-20% pre-cast SDS-polyacrylamide gels (Invitrogen). Gels were blotted onto a nitrocellulose membrane (Invitrogen). Blots were blocked for 30 minutes in blocking buffer containing 1% milk in PBS-T (0.05% Tween 20 (Sigma) in phosphate buffered saline (EMD Chemicals)). Blots were washed three times in PBS-T. The blots were then incubated with a 1:1000 dilution of rabbit polyclonal anti-collagen I antibody (Abcam) primary antibody for 1 hour at room temperature in blocking buffer. After the primary antibody was incubated, the membrane was washed with PBS-T. The blots were then incubated with a 1:2,000 dilution of anti-rabbit HRP (Calbiochem) secondary antibody in blocking buffer. The blots were washed with PBS-T. Blots were developed using TMB insoluble reagent (Tetramethylbenzidine Calbiochem).

[0597] The results showed that wild-type MMP-1 and the GVSK (G159V/S208K) mutant were able to degrade collagen I in skin in vivo. Western blot results analyzed using an anti-collagen antibody showed that both GVSK (G159V/S208K) and MMP-1 at either calcium concentration were able to degrade collagen I. In samples that were perfused with vehicle control, prominent bands greater than 100 kDa were observed. Western blot analysis of 60 minute perfusate samples from skin sites treated with both the wild-type and mutant enzyme revealed a prominent band at approximately 98 kDa that was not present in the site treated with vehicle alone as well as other minor degradation products. Histological analysis of GVSK (G159V/S208K) or MMP-1 treated skin confirmed that collagen degradation had occurred as the normal organization of collagenous fibrous septa in the hypodermis was disrupted.

### Example 8

### Assessment of MMP-1 Complex Formation Following In Vivo Perfusion

[0598] To assess the fate of the perfused MMP-1 protein in vivo, perfusate samples from Zucker rat skin treated with either activated MMP-1 (1 mM Ca²⁺), GVSK (1 mM Ca²⁺) or GVSK (10 mM Ca²⁺) also were analyzed by Western blot with an anti-MMP-1 antibody or by ELISA. Perfusion was performed as described in Example 7 and perfusate samples collected for analysis.

[0599] 1. Western Blot

[0600] Perfusate was analyzed by Western Blot. As a control, 100 ng of either MMP-1 or GVSK (G159V/S208K) mutant that had not been perfused into the skin also were prepared to show the composition of the protein prior to perfusion. Negative control samples of perfusates not containing perfused enzyme also were analyzed by preparing perfusate samples of Zucker rat skin that was perfused with TCN buffer only (1 mM or 10 mM Ca²⁺). A final sample also was prepared by incubating 1 μg purified wild-type MMP-1 with 1 μl Zucker rat serum in a final volume of 30 μL (final serum concentration 3.33%) for 30 minutes at room temperature. Perfusate samples (5-20 μL) containing 4 μg of protein and other samples were mixed with gel sample buffer and heated for five minutes at 99° C. All samples were electrophoresed on either 8% or 4-20% pre-cast SDS-polyacrylamide gels (Invitrogen). Gels were blotted onto a nitrocellulose membrane (Invitrogen). Blots were blocked for 30 minutes in blocking buffer containing 1% milk in PBS-T (0.05% Tween 20 (Sigma) in phosphate buffered saline (EMD Chemicals)). Blots were washed three times in PBS-T. The blots were then incubated with a goat anti-human MMP-1 antibody (R&D systems) primary antibody for 1 hour at room temperature in blocking buffer. After the primary antibody was incubated, the membrane was washed with PBS-T. The blots were then incubated with a 1:2,000 dilution of anti-goat HRP (Calbiochem) secondary antibody in blocking buffer. The blots were washed with PBS-T. Blots were developed using TMB insoluble reagent (Tetramethylbenzidine Calbiochem).

[0601] 2. ELISA

[0602] The amount of MMP-1 or GVSK (G159V/S208K) present in perfusate samples was quantified by ELISA. Immulon 4HBX 96-well plates were coated overnight with 100 pt of anti-human MMP-1 antibody (R&D) at 1 μg/mL in 100 mM sodium phosphate buffer pH 7.2 at 4° C. Plates were washed five times with 300 μL/well of PBS and blocked with 200 μL/well of PBS-T (0.05% Tween 20, Sigma) for 1 hour at room temperature. Purified human MMP-1 (R&D) standards were prepared by dilution in PBS-T to an initial concentration of 200 μg/mL. A series of six three-fold dilutions were prepared from this initial concentration. Perfusate samples were initially diluted 1:100 followed by six three-fold dilutions.

[0603] 100 μL of each standard and diluted sample were added per well of the coated and blocked plates and incubated for two hours at room temperature. Plates were washed five times with 300 μL per well with PBS-T followed by a two hour incubation at room temperature with 100 μL per well of a biotin conjugated anti-human MMP-1 antibody (R&D) at 0.25 μg/mL in PBS-T. Plates were washed five times with 300 μL PBS-T per well followed by incubation with 100 μL per well of 1 μg/mL streptavidin-HRP (Jackson ImmunoResearch) for one hour at room temperature. A final wash was done followed by the addition of 100 per well of Sure Blue TMB microwell peroxidase substrate (KPL). After five minutes, 100 μL per well of TMB Stop Solution (KPL) was added to the reactions, and the plates were read using the SpectraMax M3 fluorescent plate reader (Molecular Devices) at 450 nm. Perfusate samples were assayed in duplicate and calculated by averaging the readings for each sample within the linear range of the assay. The amount of uncomplexed protein detected in the perfusate at each time point was determined as a percentage of the starting concentration.

[0604] 3. Results

[0605] Western Blot of pre-injection controls of 100 ng of either activated MMP-1 or activated GVSK (G159V/S208K) showed a prominent monomer band near 50 kDa. The negative control perfusate samples that were not perfused with enzyme did not show any prominent equivalent bands. Perfusate samples from skin perfused with MMP-1 (in 1 mM Ca²⁺) and GVSK (in 10 mM Ca²⁺) samples were analyzed at 2 minutes and 90 minutes after perfusion. As early as 2 minutes after perfusion, there were multiple higher molecular weight bands in addition to the activated monomer protein band near 50 kDa that were present in both samples. The presence of multiple high molecular weight bands that were reactive with the MMP-1 antibody also was observed in the sample containing purified MMP-1 mixed with Zucker rat serum. The higher molecular weight bands indicate that the enzyme is interacting with a serum-derived protein in vivo. Also in both perfusate samples, the percentage of higher molecular weight bands increased concomitant with a decrease in monomer band with time in the 90 minute perfusate samples. For the samples perfused with wild-type MMP-1, the monomer band was only slightly decreased, whereas in the perfusate sample from skin perfused with GVSK (in 10 mM Ca²⁺), there was no monomer remaining by 90 minutes after perfusion.

[0606] The amount of MMP-1 or GVSK (G159V/S208K) in the perfusates was quantitated by solid phase capture ELISA using an antibody that recognizes predominantly the monomeric or uncomplexed form of the protein. The percent of uncomplexed protein detected in perfusate samples collected 2 minutes after perfusion with MMP-1 (in 1 mM Ca²⁺) or GVSK (in 10 mM Ca²⁺) was about 90% of the starting concentration, whereas in samples perfused with GVSK (in 1 mM Ca²⁺) it was only about 45% of the starting concentration. For all proteins, the amount of uncomplexed protein as a percentage of the starting concentration decreased over time, although the decrease was most striking for GVSK (in 1 mM Ca²⁺) samples where less than one tenth of uncomplexed form was detectable by 30 minutes post-perfusion. In contrast, for the GVSK (in 10 mM Ca²⁺) samples, the concentration of the protein in perfusate decreased to 50% of the starting concentration 30 minutes after perfusion, and further decreased to 30% and to about 13% in perfusate samples collected 60 minutes and 90 minutes, respectively. Wild-type MMP (in 1 mM Ca²⁺) was the most stable, where the concentration of the protein in the perfusate was approximately half of the starting concentration in perfusate samples collected 30 minutes after start of perfusion and was approximately one third in samples 90 minutes after perfusion. Thus, the results show that at the lower calcium concentration, the GVSK (G159V/S208K) mutant was more susceptible to complex formation.

### Example 9

### Assessment of MMP-1 Complex Formation with α-2 Macroglobulin

[0607] To determine whether the higher molecular weight bands observed in perfusate samples were due to MMP-1 or GVSK (G159V/S208K) bound to a-2 macroglobulin, an immunoprecipitation was performed. For the immunoprecipitation, 12 μg of total protein from the rat perfusates (approximately 15-30 μL) were mixed with 5 μL of an anti-rat a-2 macroglobulin rabbit antibody (Alpha Diagnostic International) and brought to a final volume of 200 μL with PBS-T. After an overnight incubation at 4° C., 40 μL of protein A/G beads (Pall Scientific) were added and incubated with rotation for 3 hours at room temperature. Each sample was washed four times with 1 ml of PBS-T and 30 μL of gel sample buffer was added. The samples were heated for five minutes at 99° C., electrophoresed on a 4-20% SDS-polyacrylamide gel, and then transferred onto a nitrocellulose membrane. The blots were probed with the anti-human MMP-1 antibody as described in Example 8.

[0608] Western blot with anti-MMP-1 antibody of perfusate samples from animals perfused with buffer alone (i.e. not treated with either MMP-1 or GVSK), when immunoprecipitated with an anti-a-2 macroglobulin, revealed a non-specific band at 60 kDa, but no higher molecular weight bands. In contrast, the same higher molecular weight bands observed in either MMP-1 or GVSK (G159V/S208K) treated skin perfusates were present in perfusate samples obtained 2 minutes and 90 minutes after perfusion, indicating that MMP-1 is complexing with a-2-macroglobulin in the skin in vivo.

### Example 10

### Effect of Serum on MMP-1 Activity

[0609] To assess the effect that formation of complexes with a-2-macroglobulin, or other serum components, had on MMP-1 activity, proteins were incubated with serum and activity assessed. Activated MMP-1 and GVSK, at 1 μg/mL, were incubated in 10% Zucker rat serum containing either 1 mM or 10 mM Ca²⁺ in a final volume of 120 μL for 5, 15, 30, 60, and 120 minutes at 25° C. After incubation, the enzymatic activity was determined, using a fluorogenic peptide substrate, as described in Example 2C.

[0610] The activity of MMP-1 in 1 mM Ca²⁺ buffer was unaffected by incubation with serum over the course of the study. In contrast, incubation with serum resulted in a gradual decrease in activity of GVSK in 10 mM Ca²⁺ over the course of the study, with approximately 74% of the original activity remaining by the 2 hour time point. Decreasing the calcium concentration of the GVSK sample to 1 mM Ca²⁺ resulted in a rapid reduction of activity of GVSK in the presence of serum. After 15 minutes of serum incubation, one-third of the activity of GVSK in 1 mM Ca²⁺ was lost, and less than 50% of activity remained after 30 minutes. By the 2 hour end time point, only approximately 17% of the activity of GVSK in 1 mM Ca²⁺ remained, indicating that a decrease in calcium concentration rendered GVSK more susceptible to serum-mediated enzymatic inactivation.

### Example 11

### GVSK (G159V/S208K) Digestion of Keloidal Collagen

[0611] Eight micron cryosections were prepared from a human keloid biopsy. The sections were placed on slides and incubated in 150 mL of either 10 mM TCN (50 mM Tris, pH 7.5, 10 mM CaCl₂, 150 mM NaCl) buffer alone or 1.6 mg/mL modified MMP-1 G159V/S208K in 10 mM TCN buffer for two hours at 37° C. Following the incubation, the sections were fixed for 5 minutes in 10% neutral buffered formalin (VWR) at room temperature. The sections were then stained with hematoxylin and eosin (H&E), using standard procedures, and analyzed by light microscopy. Micrographs were taken using a Nikon Eclipse TE2000-U microscope equipped with Spot software, version 4.6 (Spot Imaging Solutions).

[0612] The sections treated with G159V/S208K, exhibited a dramatic decrease in the intensity of H&E staining compared to buffer treatment alone, indicating that a majority of the collagen had been degraded by the G159V/S208K enzyme. In particular, the smaller collagen bundles in the hyperdermis appeared to be completely digested and the majority of the larger bundles of collagen, found deep within the keloid, also were digested as compared to buffer treatment alone. These results show that, in the presence of 10 mM Ca²⁺, the G159V/S208K mutant enzyme is capable of digesting human fibrotic collagen.

[0613] Since modifications will be apparent to those of skill in this art, it is intended that this invention be limited only by the scope of the appended claims.

1. A method of treating a fibrotic disease or condition, wherein:
degrading a component of the extracellular matrix effects treatment of the disease or condition; and
the method comprises:
a) administering to a locus of a subject a therapeutically effective amount of a modified matrix metalloprotease-1 (MMP-1) or a catalytically active fragment thereof to degrade an extracellular matrix substrate of the MMP-1, wherein:
the modified MMP-1 comprises an amino acid replacement in an unmodified MMP-1 polypeptide or catalytically active fragment thereof; and
the modification confers to the modified MMP-1 or catalytically active fragment thereof reduced activity in the presence of physiological levels of extracellular calcium compared to its activity in the presence of a calcium concentration that is greater than the physiological level, whereby the activity of the modified MMP-1 decreases upon exposure to physiological conditions; and
b) administering at or near the same locus a composition containing calcium in a concentration that is greater than physiological levels of extracellular calcium, whereby the modified MMP-1 is conditionally active after administration so that the component of the extracellular matrix is degraded for a limited time to thereby treat the disease or condition.

2. The method of claim 1, wherein the unmodified MMP-1 or catalytically active fragment comprises the sequence of amino acids set forth in SEQ ID NO:5 or is a catalytically active fragment thereof, or a sequence of amino acids that exhibits at least 85% sequence identity to SEQ ID NO:5 or a catalytically active fragment thereof.

3. The method of claim 1, wherein the modified MMP-1 and calcium are administered separately or together in the same composition.

4. The method of claim 3, wherein:
the modified MMP-1 and calcium are administered together; and
the administered composition comprises the modified MMP-1 and calcium in a concentration that is greater than physiological levels of extracellular calcium.

5. The method of claim 3, wherein:
the modified MMP-1 and calcium are administered separately; and
the calcium is administered prior to, intermittently with, subsequently to, or simultaneously with administration of the modified MMP-1 or catalytically active fragment.

6. The method of claim 1, wherein the modified MMP-1 or catalytically active fragment thereof exhibits reduced activity at physiological levels of extracellular calcium compared to the activity of the corresponding unmodified MMP-1 not containing the modification(s).

7. The method of claim 1, wherein the modified MMP-1 or catalytically active fragment comprises an amino acid replacement at or near an amino acid residue that is a metal-binding site.

8. The method of claim 7, wherein the metal-binding site is a zinc- or calcium-binding site.

9. The method of claim 8, wherein the modified MMP-1 or catalytically active fragment comprises a modification at an amino acid position corresponding to a position selected from among 102, 103, 104, 105, 106, 107, 108, 136, 137, 138, 139, 140, 141, 142, 146, 147, 148, 149, 150, 151, 152, 153, 154, 155, 156, 157, 158, 159, 160, 161, 162, 163, 164, 165, 166, 167, 168, 169, 170, 171, 172, 173, 174, 175, 176, 177, 178, 179, 180, 181, 182, 183, 184, 185, 196, 197, 198, 199, 201, 202, 203, 204, 205, 206, 207, 208, 209, 210, 211, 212, 263, 264, 265, 266, 267, 268, 269, 307, 308, 309, 310, 311, 312, 313, 356, 357, 358, 359, 360, 361, 362, 405, 406, 407, 408, 409, 410 and 411, with reference to amino acid positions set forth in SEQ ID NO:2, wherein corresponding amino acid positions are identified by alignment of the MMP-1 polypeptide with the polypeptide set forth in SEQ ID NO:2.

10. The method of claim 9, wherein the modified MMP-1 or catalytically active fragment comprises an amino acid replacement selected from among replacement with: R at a position corresponding to position 102; K at a position corresponding to position 102; V at a position corresponding to position 102; M at a position corresponding to position 102; P at a position corresponding to position 102; N at a position corresponding to position 102; G at a position corresponding to position 102; L at a position corresponding to position 102; D at a position corresponding to position 102; S at a position corresponding to position 102; F at a position corresponding to position 102; A at a position corresponding to position 102; E at a position corresponding to position 102; Q at a position corresponding to position 102; C at a position corresponding to position 102; N at position corresponding to position 103; E at a position corresponding to position 104; T at a position corresponding to position 104; R at a position corresponding to position 104; D at a position corresponding to position 104; Q at a position corresponding to position 104; V at a position corresponding to position 104; Y at a position corresponding to position 104; H at a position corresponding to position 104; L at a position corresponding to position 104; A at a position corresponding to position 104; M at a position corresponding to position 104; A at a position corresponding to position 105; C at a position corresponding to position 105; F at a position corresponding to position 105; G at a position corresponding to position 105; I at a position corresponding to position 105; L at a position corresponding to position 105; M at a position corresponding to position 105; N at a position corresponding to position 105; P at a position corresponding to position 105; R at a position corresponding to position 105; S at a position corresponding to position 105; T at a position corresponding to position 105; V at a position corresponding to position 105; W at a position corresponding to position 105; E at a position corresponding to position 105; M at a position corresponding to position 106; A at a position corresponding to position 106; Y at a position corresponding to position 106; V at a position corresponding to position 106; I at a position corresponding to position 106; L at a position corresponding to position 107; T at a position corresponding to position 107; S at a position corresponding to position 107; R at a position corresponding to position 107; M at a position corresponding to position 107; V at a position corresponding to position 107; D at a position corresponding to position 107; A at a position corresponding to position 107; K at a position corresponding to position 107; G at a position corresponding to position 107; P at a position corresponding to position 108; G at a position corresponding to position 108; E at a position corresponding to position 108; A at a position corresponding to position 108; Y at a position corresponding to position 108; K at a position corresponding to position 108; C at a position corresponding to position 108; S at a position corresponding to position 108; S at a position corresponding to position 108; F at a position corresponding to position 108; I at a position corresponding to position 108; L at a position corresponding to position 108; N at a position corresponding to position 108; D at a position corresponding to position 136; M at a position corresponding to position 136; N at a position corresponding to position 136; A at a position corresponding to position 136; L at a position corresponding to position 136; P at a position corresponding to position 136; T at a position corresponding to position 136; R at a position corresponding to position 136; S at a position corresponding to position 136; H at a position corresponding to position 136; E at a position corresponding to position 136; A at a position corresponding to position 137; R at a position corresponding to position 137; G at a position corresponding to position 137; K at a position corresponding to position 137; H at a position corresponding to position 137; P at a position corresponding to position 137; S at a position corresponding to position 137; L at a position corresponding to position 137; W at a position corresponding to position 137; F at a position corresponding to position 137; T at a position corresponding to position 137; Y at a position corresponding to position 137; E at a position corresponding to position 137; G at a position corresponding to position 138; R at a position corresponding to position 139; V at a position corresponding to position 139; M at a position corresponding to position 139; C at a position corresponding to position 139; P at a position corresponding to position 139; P at a position corresponding to position 139; S at a position corresponding to position 139; L at a position corresponding to position 139; I at a position corresponding to position 139; H at a position corresponding to position 139; A at a position corresponding to position 139; G at a position corresponding to position 139; F at a position corresponding to position 139; N at a position corresponding to position 139; W at a position corresponding to position 139; Y at a position corresponding to position 139; E at a position corresponding to position 139; E at a position corresponding to position 141; I at a position corresponding to position 141; R at a position corresponding to position 141; S at a position corresponding to position 141; L at a position corresponding to position 141; A at a position corresponding to position 141; D at a position corresponding to position 141; W at a position corresponding to position 141; H at a position corresponding to position 141; N at a position corresponding to position 141; L at a position corresponding to position 142; M at a position corresponding to position 142; V at a position corresponding to position 142; T at a position corresponding to position 146; N at a position corresponding to position 146; Q at a position corresponding to position 146; K at a position corresponding to position 146; S at a position corresponding to position 146; D at a position corresponding to position 146; A at a position corresponding to position 146; Y at a position corresponding to position 146; V at a position corresponding to position 146; R at a position corresponding to position 147; F at a position corresponding to position 147; H at a position corresponding to position 147; W at a position corresponding to position 147; T at a position corresponding to position 147; C at a position corresponding to position 147; S at a position corresponding to position 147; V at a position corresponding to position 147; Q at a position corresponding to position 147; M at a position corresponding to position 147; R at a position corresponding to position 148; R at a position corresponding to position 148; I at a position corresponding to position 148; T at a position corresponding to position 148; G at a position corresponding to position 148; G at a position corresponding to position 148; V at a position corresponding to position 148; A at a position corresponding to position 148; A at a position corresponding to position 148; W at a position corresponding to position 148; P at a position corresponding to position 148; S at a position corresponding to position 148; N at a position corresponding to position 148; S at a position corresponding to position 150; E at a position corresponding to position 150; G at a position corresponding to position 150; M at a position corresponding to position 150; M at a position corresponding to position 150; T at a position corresponding to position 150; W at a position corresponding to position 150; A at a position corresponding to position 150; N at a position corresponding to position 150; K at a position corresponding to position 150; L at a position corresponding to position 150; L at a position corresponding to position 150; V at a position corresponding to position 150; D at a position corresponding to position 150; H at a position corresponding to position 150; G at a position corresponding to position 152; C at a position corresponding to position 152; F at a position corresponding to position 152; L at a position corresponding to position 152; L at a position corresponding to position 152; L at a position corresponding to position 152; P at a position corresponding to position 152; R at a position corresponding to position 152; H at a position corresponding to position 152; T at a position corresponding to position 152; Y at a position corresponding to position 152; K at a position corresponding to position 152; D at a position corresponding to position 152; W at a position corresponding to position 152; I at a position corresponding to position 152; A at a position corresponding to position 152; S at a position corresponding to position 152; R at a position corresponding to position 152; G at a position corresponding to position 153; H at a position corresponding to position 153; V at a position corresponding to position 153; T at a position corresponding to position 153; P at a position corresponding to position 153; F at a position corresponding to position 153; D at a position corresponding to position 153; Q at a position corresponding to position 153; Y at a position corresponding to position 153; L at a position corresponding to position 154; C at a position corresponding to position 154; S at a position corresponding to position 154; I at a position corresponding to position 154; M at a position corresponding to position 155; H at a position corresponding to position 156; L at a position corresponding to position 156; E at a position corresponding to position 156; A at a position corresponding to position 156; W at a position corresponding to position 156; C at a position corresponding to position 156; P at a position corresponding to position 156; P at a position corresponding to position 156; V at a position corresponding to position 156; V at a position corresponding to position 156; K at a position corresponding to position 156; S at a position corresponding to position 156; G at a position corresponding to position 156; T at a position corresponding to position 156; Y at a position corresponding to position 156; R at a position corresponding to position 156; M at a position corresponding to position 156; K at a position corresponding to position 157; D at a position corresponding to position 157; F at a position corresponding to position 157; R at a position corresponding to position 157; H at a position corresponding to position 157; L at a position corresponding to position 157; N at a position corresponding to position 157; N at a position corresponding to position 157; Y at a position corresponding to position 157; S at a position corresponding to position 157; T at a position corresponding to position 157; A at a position corresponding to position 157; A at a position corresponding to position 157; Q at a position corresponding to position 157; P at a position corresponding to position 157; P at a position corresponding to position 157; V at a position corresponding to position 157; V at a position corresponding to position 157; M at a position corresponding to position 157; S at a position corresponding to position 158; Y at a position corresponding to position 158; R at a position corresponding to position 158; L at a position corresponding to position 158; V at a position corresponding to position 158; V at a position corresponding to position 158; C at a position corresponding to position 158; A at a position corresponding to position 158; W at a position corresponding to position 158; I at a position corresponding to position 158; F at a position corresponding to position 158; Q at a position corresponding to position 158; T at a position corresponding to position 158; G at a position corresponding to position 158; K at a position corresponding to position 158; N at a position corresponding to position 158; D at a position corresponding to position 158; R at a position corresponding to position 159; S at a position corresponding to position 159; Q at a position corresponding to position 159; P at a position corresponding to position 159; V at a position corresponding to position 159; K at a position corresponding to position 159; A at a position corresponding to position 159; Y at a position corresponding to position 159; E at a position corresponding to position 159; T at a position corresponding to position 159; M at a position corresponding to position 159; I at a position corresponding to position 159; W at a position corresponding to position 159; W at a position corresponding to position 159; L at a position corresponding to position 159; C at a position corresponding to position 159; A at a position corresponding to position 160; H at a position corresponding to position 160; N at a position corresponding to position 160; W at a position corresponding to position 160; R at a position corresponding to position 160; M at a position corresponding to position 160; Q at a position corresponding to position 160; V at a position corresponding to position 160; S at a position corresponding to position 160; E at a position corresponding to position 160; L at a position corresponding to position 160; T at a position corresponding to position 160; S at a position corresponding to position 161; C at a position corresponding to position 161; L at a position corresponding to position 161; R at a position corresponding to position 161; R at a position corresponding to position 161; G at a position corresponding to position G; W at a position corresponding to position 161; Y at a position corresponding to position 161; E at a position corresponding to position 161; P at a position corresponding to position 161; T at a position corresponding to position 161; H at a position corresponding to position 161; I at a position corresponding to position 161; V at a position corresponding to position 161; F at a position corresponding to position 161; Q at a position corresponding to position 161; S at a position corresponding to position 164; W at a position corresponding to position 166; D at a position corresponding to position 167; R at a position corresponding to position 167; A at a position corresponding to position 167; S at a position corresponding to position 167; S at a position corresponding to position 167; F at a position corresponding to position 167; Y at a position corresponding to position 167; P at a position corresponding to position 167; T at a position corresponding to position 167; V at a position corresponding to position 167; L at a position corresponding to position 167; M at a position corresponding to position 167; N at a position corresponding to position 167; G at a position corresponding to position 167; K at a position corresponding to position 167; E at a position corresponding to position 167; R at a position corresponding to position 168; L at a position corresponding to position 170; R at a position corresponding to position 170; R at a position corresponding to position 170; I at a position corresponding to position 170; T at a position corresponding to position 170; Q at a position corresponding to position 170; G at a position corresponding to position 170; S at a position corresponding to position 170; H at a position corresponding to position 170; M at a position corresponding to position 170; K at a position corresponding to position 170; S at a position corresponding to position 171; M at a position corresponding to position 171; N at a position corresponding to position 171; P at a position corresponding to position 171; R at a position corresponding to position 171; Y at a position corresponding to position 171; A at a position corresponding to position 171; Q at a position corresponding to position 171; H at a position corresponding to position 171; L at a position corresponding to position 171; W at a position corresponding to position 171; C at a position corresponding to position 171; K at a position corresponding to position 171; E at a position corresponding to position 171; D at a position corresponding to position 171; Y at a position corresponding to position 172; T at a position corresponding to position 172; P at a position corresponding to position 172; A at a position corresponding to position 172; L at a position corresponding to position 172; Q at a position corresponding to position 172; E at a position corresponding to position 172; M at a position corresponding to position 172; D at a position corresponding to position 172; V at a position corresponding to position 172; R at a position corresponding to position 172; W at a position corresponding to position 172; N at a position corresponding to position 172; C at a position corresponding to position 173; L at a position corresponding to position 173; K at a position corresponding to position 173; W at a position corresponding to position 173; W at a position corresponding to position 173; S at a position corresponding to position 173; A at a position corresponding to position 173; R at a position corresponding to position 173; N at a position corresponding to position 173; T at a position corresponding to position 173; D at a position corresponding to position 173; V at a position corresponding to position 173; F at a position corresponding to position 173; M at a position corresponding to position 173; Y at a position corresponding to position 173; P at a position corresponding to position 173; I at a position corresponding to position 175; T at a position corresponding to position 175; N at a position corresponding to position 175; V at a position corresponding to position 175; S at a position corresponding to position 175; R at a position corresponding to position 175; G at a position corresponding to position 175; A at a position corresponding to position 175; F at a position corresponding to position 175; C at a position corresponding to position 175; Q at a position corresponding to position 175; Y at a position corresponding to position 175; L at a position corresponding to position 175; H at a position corresponding to position 175; P at a position corresponding to position 175; E at a position corresponding to position 175; F at a position corresponding to position 176; Q at a position corresponding to position 176; V at a position corresponding to position 176; T at a position corresponding to position 176; C at a position corresponding to position 176; L at a position corresponding to position 176; P at a position corresponding to position 179; L at a position corresponding to position 179; E at a position corresponding to position 179; G at a position corresponding to position 179; G at a position corresponding to position 179; S at a position corresponding to position 179; A at a position corresponding to position 179; K at a position corresponding to position 179; T at a position corresponding to position 179; I at a position corresponding to position 179; R at a position corresponding to position 179; N at a position corresponding to position 179; W at a position corresponding to position 179; Q at a position corresponding to position 179; V at a position corresponding to position 179; C at a position corresponding to position 179; M at a position corresponding to position 180; P at a position corresponding to position 180; K at a position corresponding to position 180; Y at a position corresponding to position 180; Q at a position corresponding to position 180; R at a position corresponding to position 180; A at a position corresponding to position 180; T at a position corresponding to position 180; I at a position corresponding to position 180; F at a position corresponding to position 180; C at a position corresponding to position 180; G at a position corresponding to position 180; S at a position corresponding to position 180; N at a position corresponding to position 180; D at a position corresponding to position 180; S at a position corresponding to position 181; Q at a position corresponding to position 181; A at a position corresponding to position 181; T at a position corresponding to position 181; E at a position corresponding to position 181; C at a position corresponding to position 182; P at a position corresponding to position 182; P at a position corresponding to position 182; S at a position corresponding to position 182; T at a position corresponding to position 182; R at a position corresponding to position 182; D at a position corresponding to position 182; A at a position corresponding to position 182; F at a position corresponding to position 182; L at a position corresponding to position 182; I at a position corresponding to position 182; Y at a position corresponding to position 182; Q at a position corresponding to position 182; W at a position corresponding to position 182; M at a position corresponding to position 182; G at a position corresponding to position 182; K at a position corresponding to position 183; W at a position corresponding to position 183; W at a position corresponding to position 183; E at a position corresponding to position 183; A at a position corresponding to position 183; T at a position corresponding to position 183; N at a position corresponding to position 183; H at a position corresponding to position 183; V at a position corresponding to position 183; C at a position corresponding to position 183; M at a position corresponding to position 183; G at a position corresponding to position 183; S at a position corresponding to position 183; S at a position corresponding to position 185; C at a position corresponding to position 197; V at a position corresponding to position 201; M at a position corresponding to position 201; E at a position corresponding to position 203; A at a position corresponding to position 204; M at a position corresponding to position 205; I at a position corresponding to position 205; A at a position corresponding to position 207; M at a position corresponding to position 207; D at a position corresponding to position 208; V at a position corresponding to position 208; P at a position corresponding to position 208; G at a position corresponding to position 208; A at a position corresponding to position 208; K at a position corresponding to position 208; N at a position corresponding to position 208; F at a position corresponding to position 208; Q at a position corresponding to position 208; W at a position corresponding to position 208; T at a position corresponding to position 208; E at a position corresponding to position 208; C at a position corresponding to position 208; R at a position corresponding to position 208; L at a position corresponding to position 208; T at a position corresponding to position 210; P at a position corresponding to position 211; Rat a position corresponding to position 211; K at a position corresponding to position 211; G at a position corresponding to position 211; M at a position corresponding to position 211; M at a position corresponding to position 211; N at a position corresponding to position 211; N at a position corresponding to position 211; V at a position corresponding to position 211; Q at a position corresponding to position 211; S at a position corresponding to position 211; A at a position corresponding to position 211; E at a position corresponding to position 212; T at a position corresponding to position 212; N at a position corresponding to position 212; S at a position corresponding to position 212; P at a position corresponding to position 212; Q at a position corresponding to position 212; F at a position corresponding to position 212; H at a position corresponding to position 212; and Y at a position corresponding to position 212, with reference to amino acid positions set forth in SEQ ID NO:2, wherein corresponding amino acid positions are identified by alignment of the MMP-1 polypeptide with the polypeptide set forth in SEQ ID NO:2.

11. The method of claim 8, wherein the modified MMP-1 or catalytically active fragment comprises an amino acid replacement at a calcium binding site and the amino acid replacement is at an amino acid position corresponding to a position selected from among 105, 139, 156, 157, 159, 161, 171, 173, 175, 179, 180, 182, 266, 310, 359 and 408, with reference to amino acid positions set forth in SEQ ID NO:2, wherein corresponding amino acid positions are identified by alignment of the MMP-1 polypeptide with the polypeptide set forth in SEQ ID NO:2.

12. The method of claim 11, wherein:
the unmodified MMP-1 comprises an acidic amino acid at the modified amino acid position that is an aspartic acid (D) or glutamic acid (E); and
the amino acid replacement is replacement by an amino acid residue that is a non-acidic amino acid residue.

13. The method of claim 12, wherein the amino acid replacement is selected from among:
replacement by a neutral amino acid residue selected from among cysteine (C), asparagine (N), glutamine (Q), threonine (T), tyrosine (Y), serine (S) and glycine (G);
replacement by a hydrophobic amino acid residue selected from among phenylalanine (F), methionine (M), tryptophan (W), isoleucine (I), valine (V), leucine (L), alanine (A) and proline (P); and
replacement by a basic amino acid residue selected from among histidine (H), lysine (K) and arginine (R).

14. The method of claim 13, wherein the modified MMP-1 or catalytically active fragment comprises an amino acid replacement selected from among replacement with: A at a position corresponding to position 105; I at a position corresponding to position 105; N at a position corresponding to position 105; L at a position corresponding to position 105; G at a position corresponding to position 105; R at a position corresponding to position 156; H at a position corresponding to position 156; K at a position corresponding to position 156; T at a position corresponding to position 156; N at a position corresponding to position 179; T at a position corresponding to position 180; F at a position corresponding to position 180; and T at a position corresponding to position 182, with reference to amino acid positions set forth in SEQ ID NO:2.

15. The method of claim 14, wherein the modified MMP-1 or catalytically active fragment comprises an amino acid replacement that is replacement with T at a position corresponding to position 156, with reference to amino acid positions set forth in SEQ ID NO:2.

16. The method of claim 14, wherein the modified MMP-1 or catalytically active fragment comprises an amino acid replacement that is replacement with N at a position corresponding to position 179, with reference to amino acid positions set forth in SEQ ID NO:2.

17. The method of claim 14, wherein the modified MMP-1 or catalytically active fragment comprises replacement with T at a position corresponding to position 156 and replacement with N at a position corresponding to position 179, with reference to amino acid positions set forth in SEQ ID NO:2.

18. The method of claim 11, wherein:
the modified MMP-1 or catalytically active fragment comprises an amino acid replacement at an amino acid position corresponding to position 159, with reference to amino acid positions set forth in SEQ ID NO:2;
the amino acid replacement is replacement by a hydrophobic amino acid residue; and
corresponding amino acid positions are identified by alignment of the MMP-1 polypeptide with the polypeptide set forth in SEQ ID NO:2.

19. The method of claim 18, wherein the amino acid replacement is by a hydrophobic amino acid residue selected from among phenylalanine (F), methionine (M), tryptophan (W), isoleucine (I), valine (V), leucine (L), alanine (A) and proline (P).

20. The method of claim 19, wherein the modified MMP-1 or catalytically active fragment comprises an amino acid replacement with V at a position corresponding to position 159.

21. The method of claim 20, wherein the modified MMP-1 or catalytically active fragment comprises an amino acid replacement of the amino acid at a position corresponding to position 159 with V and replacement of the amino acid at a position corresponding to position 208 with K.

22. The method of claim 1, wherein the modified MMP-1 or catalytically active fragment thereof comprises an amino acid replacement of an amino acid at a position corresponding to position 227 with glutamic acid (E), with reference to amino acid positions set forth in SEQ ID NO:2; and
corresponding amino acid positions are identified by alignment of the MMP-1 polypeptide with the polypeptide set forth in SEQ ID NO:2.

23. The method of claim 22, wherein the amino acid replacement is V227E, with reference to amino acid positions set forth in SEQ ID NO:2.

24. The method of claim 1, wherein the modified MMP-1 or catalytically active fragment comprises the sequence of amino acids set forth in any of SEQ ID NOS:162-167, or a sequence of amino acids that exhibits at least 85% sequence identity to any of SEQ ID NOS:162-167 and contains the amino acid replacement(s).

25. The method of claim 1, wherein the composition comprises calcium at a concentration that is from or from about 1.5 mM to 50 mM.

26. The method of claim 1, wherein the composition comprises calcium at a concentration that is at least or about at least or is greater than 10 mM.

27. The method of claim 1, wherein the modified MMP-1 or catalytically active fragment exhibits at least 2-fold decreased matrix metalloprotease activity in the presence of physiological levels of extracellular calcium compared to its activity in the presence of a calcium concentration that is greater than the physiological level.

28. The method of claim 1, wherein the modified MMP or catalytically active fragment exhibits at least 85% sequence identity to SEQ ID NO:5 or a catalytically active fragment thereof.

29. The method of claim 1, wherein the modified MMP or catalytically active fragment comprises up to 1, 2, 3, 4, 5, 6, 7, 8, 9, 10, 11, 12, 13, 14, 15, 16, 17, 18, 19 or 20 amino acid replacements compared to the unmodified MMP-1.

30. The method of claim 1, wherein the modified MMP-1 is a zymogen and the method further comprises processing the zymogen to a mature enzyme prior to administration.

31. The method of claim 1, comprising administering a calcium-chelating agent to reduce the activity of the modified MMP-1 or catalytically active fragment.

32. The method of claim 31, wherein the calcium-chelating agent is administered at a concentration of 1 μM to 100 mM.

33. The method of claim 31, wherein the calcium-chelating agent is administered prior to, intermittently with, subsequently to, or simultaneously with administration of the composition comprising the modified MMP-1 or catalytically active fragment.

34. The method of claim 1, wherein the composition(s) is(are) administered to the extracellular matrix (ECM) of the subject.

35. The method of claim 1, wherein administration is selected from among subcutaneous, intramuscular, intralesional and intradermal routes of administration.

36. The method of claim 1, wherein the modified MMP-1 or catalytically active fragment is administered in an amount that is from or from about 10 μg to 100 mg.

37. The method of claim 1, wherein:
the component of the extracellular matrix is a collagen;
the fibrotic disease or condition is a collagen-mediated disease or condition; and
the modified MMP-1 or catalytically active fragment exhibits activity to cleave a collagen.

38. The method of claim 37, wherein the component of the extracellular matrix is a collagen and the modified MMP-1 degrades one or both of collagen type I and collagen type III.

39. The method of claim 37, wherein:
the collagen-mediated disease or condition is associated with irregular formation of collagen fibers; and
the modified MMP severs the fibers, thereby treating the disease or condition.

40. The method of claim 37, wherein the collagen-mediated disease or condition is selected from among cellulite, Dupuytren's disease, Peyronie's disease, Ledderhose fibrosis, stiff joints, existing scars, scleroderma, lymphedema and collagenous colitis.

41. The method of claim 40, wherein the collagen-mediated disease or condition is stiff joints that is frozen shoulder.

42. The method of claim 40, wherein the collagen-mediated disease or condition is existing scars that is selected from among surgical adhesions, keloids, hypertrophic scars and depressed scars.

43. The method of claim 1, wherein the fibrotic disease or condition is herniated protruding discs.

The application's sequence listing, which the Patent Office published only in electronic form, follows.

SEQUENCE LISTING (167 sequences)

SEQ ID NO: 1 - protein, 469 aa, Homo sapiens
  Pre-pro-MMP-1 (MMP-1 precursor)
MHSFPPLLLLLFWGVVSHSFPATLETQEQDVDLVQKYLEKYYNLKNDGRQVEKRRNSGPVVEKLKQMQEFFGLKVTGKPDAETLKVMKQPRCGVPDVAQFVLTEGNPRWEQTHLTYRIENYTPDLPRADVDHAIEKAFQLWSNVTPLTFTKVSEGQADIMISFVRGDHRDNSPFDGPGGNLAHAFQPGPGIGGDAHFDEDERWTNNFREYNLHRVAAHELGHSLGLSHSTDIGALMYPSYTFSGDVQLAQDDIDGIQAIYGRSQNPVQPIGPQTPKACDSKLTFDAITTIRGEVMFFKDRFYMRTNPFYPEVELNFISVFWPQLPNGLEAAYEFADRDEVRFFKGNKYWAVQGQNVLHGYPKDIYSSFGFPRTVKHIDAALSEENTGKTYFFVANKYWRYDEYKRSMDPGYPKMIAHDFPGIGHKVDAVFMKDGFFYFFHGTRQYKFDPKTKRILTLQKANSWFNCRKN

SEQ ID NO: 2 - protein, 450 aa, Homo sapiens
  Pro-MMP-1 (Mature MMP-1 with prodomain; zymogen)
FPATLETQEQDVDLVQKYLEKYYNLKNDGRQVEKRRNSGPVVEKLKQMQEFFGLKVTGKPDAETLKVMKQPRCGVPDVAQFVLTEGNPRWEQTHLTYRIENYTPDLPRADVDHAIEKAFQLWSNVTPLTFTKVSEGQADIMISFVRGDHRDNSPFDGPGGNLAHAFQPGPGIGGDAHFDEDERWTNNFREYNLHRVAAHELGHSLGLSHSTDIGALMYPSYTFSGDVQLAQDDIDGIQAIYGRSQNPVQPIGPQTPKACDSKLTFDAITTIRGEVMFFKDRFYMRTNPFYPEVELNFISVFWPQLPNGLEAAYEFADRDEVRFFKGNKYWAVQGQNVLHGYPKDIYSSFGFPRTVKHIDAALSEENTGKTYFFVANKYWRYDEYKRSMDPGYPKMIAHDFPGIGHKVDAVFMKDGFFYFFHGTRQYKFDPKTKRILTLQKANSWFNCRKN

SEQ ID NO: 3 - DNA, 1353 bp, Artificial Sequence
  hMMP-1
  CDS (1)...(1353): Pro-MMP-1
  CDS (241)...(726): Catalytic Domain
  CDS (727)...(774): Linker Region
  CDS (766)...(1341): Hemopexin-Like Repeats
ttcccagcgactctagaaacacaagagcaagatgtggacttagtccagaaatacctggaaaaatactacaacctgaagaatgatgggaggcaagttgaaaagcggagaaatagtggcccagtggttgaaaaattgaagcaaatgcaggaattctttgggctgaaagtgactgggaaaccagatgctgaaaccctgaaggtgatgaagcagcccagatgtggagtgcctgatgtggctcagtttgtcctcactgaggggaaccctcgctgggagcaaacacatctgacctacaggattgaaaattacacgccagatttgccaagagcagatgtggaccatgccattgagaaagccttccaactctggagtaatgtcacacctctgacattcaccaaggtctctgagggtcaagcagacatcatgatatcttttgtcaggggagatcatcgggacaactctccttttgatggacctggaggaaatcttgctcatgcttttcaaccaggcccaggtattggaggggatgctcattttgatgaagatgaaaggtggaccaacaatttcagagagtacaacttacatcgtgttgcggctcatgaactcggccattctcttggactctcccattctactgatatcggggctttgatgtaccctagctacaccttcagtggtgatgttcagctagctcaggatgacattgatggcatccaagccatatatggacgttcccaaaatcctgtccagcccatcggcccacaaaccccaaaagcgtgtgacagtaagctaacctttgatgctataactacgattcggggagaagtgatgttctttaaagacagattctacatgcgcacaaatcccttctacccggaagttgagctcaatttcatttctgttttctggccacaactgccaaatgggcttgaagctgcttacgaatttgccgacagagatgaagtccggtttttcaaagggaataagtactgggctgttcagggacagaatgtgctacacggataccccaaggacatctacagctcctttggcttccctagaactgtgaagcatatcgatgctgctctttctgaggaaaacactggaaaaacctacttctttgttgctaacaaatactggaggtatgatgaatataaacgatctatggatccaggttatcccaaaatgatagcacatgactttcctggaattggccacaaagttgatgcagttttcatgaaagatggatttttctatttctttcatggaacaagacaatacaaatttgatcctaaaacgaagagaattttgactctccagaaagctaatagctggttcaactgcaggaaaaattga

SEQ ID NO: 4 - DNA, 1973 bp, Homo sapiens
  MMP-1
  CDS (72)...(1481): MMP-1 coding sequence
gggatattggagtagcaagaggctgggaagccatcacttaccttgcactgagaaagaagacaaaggccagtatgcacagctttcctccactgctgctgctgctgttctggggtgtggtgtctcacagcttcccagcgactctagaaacacaagagcaagatgtggacttagtccagaaatacctggaaaaatactacaacctgaagaatgatgggaggcaagttgaaaagcggagaaatagtggcccagtggttgaaaaattgaagcaaatgcaggaattctttgggctgaaagtgactgggaaaccagatgctgaaaccctgaaggtgatgaagcagcccagatgtggagtgcctgatgtggctcagtttgtcctcactgaggggaaccctcgctgggagcaaacacatctgacctacaggattgaaaattacacgccagatttgccaagagcagatgtggaccatgccattgagaaagccttccaactctggagtaatgtcacacctctgacattcaccaaggtctctgagggtcaagcagacatcatgatatcttttgtcaggggagatcatcgggacaactctccttttgatggacctggaggaaatcttgctcatgcttttcaaccaggcccaggtattggaggggatgctcattttgatgaagatgaaaggtggaccaacaatttcagagagtacaacttacatcgtgttgcggctcatgaactcggccattctcttggactctcccattctactgatatcggggctttgatgtaccctagctacaccttcagtggtgatgttcagctagctcaggatgacattgatggcatccaagccatatatggacgttcccaaaatcctgtccagcccatcggcccacaaaccccaaaagcgtgtgacagtaagctaacctttgatgctataactacgattcggggagaagtgatgttctttaaagacagattctacatgcgcacaaatcccttctacccggaagttgagctcaatttcatttctgttttctggccacaactgccaaatgggcttgaagctgcttacgaatttgccgacagagatgaagtccggtttttcaaagggaataagtactgggctgttcagggacagaatgtgctacacggataccccaaggacatctacagctcctttggcttccctagaactgtgaagcatatcgatgctgctctttctgaggaaaacactggaaaaacctacttctttgttgctaacaaatactggaggtatgatgaatataaacgatctatggatccaggttatcccaaaatgatagcacatgactttcctggaattggccacaaagttgatgcagttttcatgaaagatggatttttctatttctttcatggaacaagacaatacaaatttgatcctaaaacgaagagaattttgactctccagaaagctaatagctggttcaactgcaggaaaaattgaacattactaatttgaatggaaaacacatggtgtgagtccaaagaaggtgttttcctgaagaactgtctattttctcagtcatttttaacctctagagtcactgatacacagaatataatcttatttatacctcagtttgcatatttttttactatttagaatgtagccctttttgtactgatataatttagttccacaaatggtgggtacaaaaagtcaagtttgtggcttatggattcatataggccagagttgcaaagatcttttccagagtatgcaactctgacgttgatcccagagagcagcttcagtgacaaacatatcctttcaagacagaaagagacaggagacatgagtctttgccggaggaaaagcagctcaagaacacatgtgcagtcactggtgtcaccctggataggcaagggataactcttctaacacaaaataagtgttttatgtttggaataaagtcaaccttgtttctactgtttt

SEQ ID NO: 5 - protein, 370 aa, Homo sapiens
  Mature MMP-1
FVLTEGNPRWEQTHLTYRIENYTPDLPRADVDHAIEKAFQLWSNVTPLTFTKVSEGQADIMISFVRGDHRDNSPFDGPGGNLAHAFQPGPGIGGDAHFDEDERWTNNFREYNLHRVAAHELGHSLGLSHSTDIGALMYPSYTFSGDVQLAQDDIDGIQAIYGRSQNPVQPIGPQTPKACDSKLTFDAITTIRGEVMFFKDRFYMRTNPFYPEVELNFISVFWPQLPNGLEAAYEFADRDEVRFFKGNKYWAVQGQNVLHGYPKDIYSSFGFPRTVKHIDAALSEENTGKTYFFVANKYWRYDEYKRSMDPGYPKMIAHDFPGIGHKVDAVFMKDGFFYFFHGTRQYKFDPKTKRILTLQKANSWFNCRKN

SEQ ID NO: 6 - protein, 450 aa, Artificial Sequence
  ProMMP-1 variant F81D
FPATLETQEQDVDLVQKYLEKYYNLKNDGRQVEKRRNSGPVVEKLKQMQEFFGLKVTGKPDAETLKVMKQPRCGVPDVAQDVLTEGNPRWEQTHLTYRIENYTPDLPRADVDHAIEKAFQLWSNVTPLTFTKVSEGQADIMISFVRGDHRDNSPFDGPGGNLAHAFQPGPGIGGDAHFDEDERWTNNFREYNLHRVAAHELGHSLGLSHSTDIGALMYPSYTFSGDVQLAQDDIDGIQAIYGRSQNPVQPIGPQTPKACDSKLTFDAITTIRGEVMFFKDRFYMRTNPFYPEVELNFISVFWPQLPNGLEAAYEFADRDEVRFFKGNKYWAVQGQNVLHGYPKDIYSSFGFPRTVKHIDAALSEENTGKTYFFVANKYWRYDEYKRSMDPGYPKMIAHDFPGIGHKVDAVFMKDGFFYFFHGTRQYKFDPKTKRILTLQKANSWFNCRKN

SEQ ID NO: 7 - protein, 450 aa, Artificial Sequence
  Pro-MMP-1 variant F81E
FPATLETQEQDVDLVQKYLEKYYNLKNDGRQVEKRRNSGPVVEKLKQMQEFFGLKVTGKPDAETLKVMKQPRCGVPDVAQEVLTEGNPRWEQTHLTYRIENYTPDLPRADVDHAIEKAFQLWSNVTPLTFTKVSEGQADIMISFVRGDHRDNSPFDGPGGNLAHAFQPGPGIGGDAHFDEDERWTNNFREYNLHRVAAHELGHSLGLSHSTDIGALMYPSYTFSGDVQLAQDDIDGIQAIYGRSQNPVQPIGPQTPKACDSKLTFDAITTIRGEVMFFKDRFYMRTNPFYPEVELNFISVFWPQLPNGLEAAYEFADRDEVRFFKGNKYWAVQGQNVLHGYPKDIYSSFGFPRTVKHIDAALSEENTGKTYFFVANKYWRYDEYKRSMDPGYPKMIAHDFPGIGHKVDAVFMKDGFFYFFHGTRQYKFDPKTKRILTLQKANSWFNCRKN

SEQ ID NO: 8 - protein, 450 aa, Homo sapiens
  allelic variants of Pro-MMP-1
  VARIANT 4: Xaa = Thr or Pro
  VARIANT 10, 254: Xaa = Gln or Pro
  VARIANT 30: Xaa = Arg, Met, or Ser
  VARIANT 96: Xaa = Thr or Arg
  VARIANT 114: Xaa = Ala or Val
  VARIANT 166: Xaa = Phe or Cys
  VARIANT 172: Xaa = Ile or Val
  VARIANT 181: Xaa = Asp or His
  VARIANT 189: Xaa = Arg or Thr
  VARIANT 200: Xaa = Glu or Ala
  VARIANT 214: Xaa = Gly or Glu
  VARIANT 232: Xaa = Asp or Asn
  VARIANT 233: Xaa = Asp or Gly
  VARIANT 243: Xaa = Arg or Ser
  VARIANT 286: Xaa = Thr or Ala
  VARIANT 298: Xaa = Ile or Thr
  VARIANT 314: Xaa = Glu or Gly
  VARIANT 315: Xaa = Phe or Ser
  VARIANT 374: Xaa = Val or Met
  VARIANT 386: Xaa = Arg or Gln
  VARIANT 387: Xaa = Ser or Thr
  VARIANT 391: Xaa = Gly or Ser
  VARIANT 432: Xaa = Thr or Ala
FPAXLETQEXDVDLVQKYLEKYYNLKNDGXQVEKRRNSGPVVEKLKQMQEFFGLKVTGKPDAETLKVMKQPRCGVPDVAQFVLTEGNPRWEQTHLXYRIENYTPDLPRADVDHXIEKAFQLWSNVTPLTFTKVSEGQADIMISFVRGDHRDNSPFDGPGGNLAHAXQPGPGXGGDAHFDEXERWTNNFXEYNLHRVAAHXLGHSLGLSHSTDIXALMYPSYTFSGDVQLAQXXIDGIQAIYGXSQNPVQPIGPXTPKACDSKLTFDAITTIRGEVMFFKDRFYMRXNPFYPEVELNFXSVFWPQLPNGLEAAYXXADRDEVRFFKGNKYWAVQGQNVLHGYPKDIYSSFGFPRTVKHIDAALSEENTGKTYFFXANKYWRYDEYKXXMDPXYPKMIAHDFPGIGHKVDAVFMKDGFFYFFHGTRQYKFDPKXKRILTLQKANSWFNCRKN

SEQ ID NO: 9 - protein, 450 aa, Sus scrofa
  Pig Pro-MMP-1
PAATSETQEQDVEIVQKYLKNYYNLNSDGVPVEKKRNSGLVVEKLKQMQQFFGLKVTGKPDAETLNVMKQPRCGVPDVAEFVLTPGNPRWENTHLTYRIENYTPDLSREDVDRAIEKAFQLWSNVSPLTFTKVSEGQADIMISFVRGDHRDNSPFDGPGGNLAHAFQPGPGIGGDAHFDEDERWTKNFRDYNLYRVAAHELGHSLGLSHSTDIGALMYPNYIYTGDVQLSQDDIDGIQAIYGPSENPVQPSGPQTPQVCDSKLTFDAITTLRGELMFFKDRFYMRTNSFYPEVELNFISVFWPQVPNGLQAAYEIADRDEVRFFKGNKYWAVRGQDVLYGYPKDIHRSFGFPSTVKNIDAAVFEEDTGKTYFFVAHECWRYDEYKQSMDTGYPKMIAEEFPGIGNKVDAVFQKDGFLYFFHGTRQYQFDFKTKRILTLQKANSWFNCRKN

SEQ ID NO: 10 - protein, 450 aa, Oryctolagus cuniculus
  Rabbit Pro-MMP-1
FPAASETQEQDVEMVQKYLENYYNLKDDWRKIPKQRGNGLAVEKLKQMQEFFGLKVTGKPDAETLKMMKQPRCGVPDVAQFVLTPGNPRWEQTHLTYRIENYTPDLSRADVDNAIEKAFQLWSNVTPLTFTKVSKGQADIMISFVRGDHRDNSPFDGPEGQLAHAFQPGLGIGGDVHFDEDDRWTKDFRNYNLYRVAAHELGHSLGLSHSTDIGALMYPNYMFSGDVQLAQDDIDGIQAIYGPSQNPSQPVGPQTPKVCDSKLTFDAITTIRGEIMFFKDRFYMRANPYYSEVELNFISVFWPHLPNGLQAAYEVAHRDEILFFKGNKYWTVQGQNELPGYPKDIHSSFGFPRSVNHIDAAVSEEDTGKTYFFVANKYWRYDEYKRSMDAGYPKMIEYDFPGIGNKVDAVFKKDGFFYFFHGTRQYKFDPKTKRILTLQKANSWFNCRKN

SEQ ID NO: 11 - protein, 451 aa, Bos taurus
  bovine Pro-MMP-1
FPAATSETQEQDVETVKKYLENYYNLNSNGKKVERQRNGGLITEKLKQMQKFFGLRVTGKPDAETLNVMKQPRCGVPDVAPFVLTPGKSCWENTNLTYRIENYTPDLSRADVDQAIEKAFQLWSNVTPLTFTKVSEGQADIMISFVRGDHRDNSPFDGPGGNLAHAFQPGAGIGGDAHFDDDEWWTSNFQDYNLYRVAAHEFGHSLGLAHSTDIGALMYPSYTFSGDVQLSQDDIDGIQAIYGPSQNPTQPVGPQTPEVCDSKLTFDAITTIRGEVMFFKDRFYMRTNPLYPEVELNFISVFWPQLPNGLQAAYEVADRDEVRFFKGNKYWAVKGQDVLRGYPRDIYRSFGFPRTVKSIDAAVSEEDTGKTYFFVANKCWRYDEYKQSMDAGYPKMIAEDFPGIGNKVDAVFQKGGFFYFFHGRRQYKFDPQTKRILTLLKANSWFNCRKN

SEQ ID NO: 12 - protein, 451 aa, Equus caballus
  Horse Pro-MMP-1
FPTVPSETREEDVEMVQKYLENYYNLKSDGEQIEKQRHRSPVVEKLKQMQEFFGLKVTGKPDAETLNVMKQPRCGVPDVAEFVLTEGNPRWENTHLTYRIENYTPDLPRADVDQAIEKAFQLWSNVSPLTFTKVSEGQADIMISFVRGDHRDNSPFDGPGGNLAHAFQPGPRIGGDAHFDEDETWTSNFRNYNLYRVAAHEFGHSLGLSHSTDIGALMYPNYFFTGDVQLSQDDINGIQAIYGPSQNPIQPIGPQTPEVCDSKLTFDAITTIRGEVMFFKDRFYMRINPYYPEAELNFISIFWPQLPNGLQAAYEVSHRDEVRFFKGNKYWAVKGQDVLYGYPKDIHRSFGFPSTVKNIDAAVSEEDTGKTYFFVADKYWRYDEYKRSMDAGYPKMIADDFPGIGDKVDAVFQKDGFFYFFHGTRQYKFDPKTKRILTLQKANSWFNCRKN

SEQ ID NO: 13 - protein, 447 aa, Rattus norvegicus
  Rat Pro-MMP-1a
FPVFQDGARQNVETVWKYLENYYNLGEDVQAKNVDAKEVMAEKLRQMQQLFGLKVTGNSNSETLSAMRKPRCGVPDVAPYAITHNNPRWTKTHLTYSILNYTPYLPKEVIENAIERAFKVWSDVTPLTFERVFEEEGDIVFAFYRGDHSDNNPFDGPEYGLAHTFPPGPRLGGDVHYDLDETWTDNSDNFNLFYVTAHELGHSLGLTHSRDVGALMFPSYTWYTEDFVLNQEDINRIQALYGPSPNPIQPTGATTPHPCDGDLTFDAITTFRGEVMFFKGRFYIRVNKFMPEAELNLIGIIWPNLPGKLDAAYEVSMIDQVRYFKGNKVWVVREHTVLRGFPTDIHSFFGFPSSVTHIDAAVCEEETGKTYFFVDNMYWRYDENTQSMDPGYPRLTAEDFPGIDDKVDDVFQKGENFYFFHQSVQRRFSLRIRRVDDSRDSSTWFNC

SEQ ID NO: 14 - protein, 447 aa, Mus musculus
  Mouse Pro-MMP-1a
FPVFHNGDRQNVETVWKYLENYYNLGKNMQAKNVNGKEMMAEKLRQMQQLFGLKVTGNSDPETLRAMKKPRCGVPDVAPYAITHNNPRWTKTHLTYSILNYTPYLPKAVVEDAIARAFRVWSDVTPLTFQRVFEEEGDIVLSFHRGDHGDNNPFDGPNYKLAHTFQPGPGLGGDVHYDLDETWTNSSENFNLFYVTAHELGHSLGLTHSSDIGALMFPSYTWYTEDFVLNQDDINRIQDLYGPSPNPIQPTGATTPHPCNGDLTFDAITTFRGEVFFFKGRFYIRVNRFMPEPELNLIGILWPNLPVKLDAAYEASMIDQVRYFKGSKVWAVQEQSVLRGFPRDIHSFFGFPSNVTHIDAAVCEEETGKTYFFVDHMYWRYDENTQSMDPGYPRLTAEDFPGIDDKVDDVFQKGENFYFFHQSVQHRFNLQIRRVDDSRDSSTWFNC

SEQ ID NO: 15 - DNA, 2223 bp, Homo sapiens
  MMP-8
gctcgccagggaagggccctacccagaggacagaaagaaagccaggaggggtagagtttgaagagaagatcatgttctccctgaagacgcttccatttctgctcttactccatgtgcagatttccaaggcctttcctgtatcttctaaagagaaaaatacaaaaactgttcaggactacctggaaaagttctaccaattaccaagcaaccagtatcagtctacaaggaagaatggcactaatgtgatcgttgaaaagcttaaagaaatgcagcgattttttgggttgaatgtgacggggaagccaaatgaggaaactctggacatgatgaaaaagcctcgctgtggagtgcctgacagtggtggttttatgttaaccccaggaaaccccaagtgggaacgcactaacttgacctacaggattcgaaactataccccacagctgtcagaggctgaggtagaaagagctatcaaggatgcctttgaactctggagtgttgcatcacctctcatcttcaccaggatctcacagggagaggcagatatcaacattgctttttaccaaagagatcacggtgacaattctccatttgatggacccaatggaatccttgctcatgcctttcagccaggccaaggtattggaggagatgctcattttgatgccgaagaaacatggaccaacacctccgcaaattacaacttgtttcttgttgctgctcatgaatttggccattctttggggctcgctcactcctctgaccctggtgccttgatgtatcccaactatgctttcagggaaaccagcaactactcactccctcaagatgacatcgatggcattcaggccatctatggactttcaagcaaccctatccaacctactggaccaagcacacccaaaccctgtgaccccagtttgacatttgatgctatcaccacactccgtggagaaatacttttctttaaagacaggtacttctggagaaggcatcctcagctacaaagagtcgaaatgaattttatttctctattctggccatcccttccaactggtatacaggctgcttatgaagattttgacagagacctcattttcctatttaaaggcaaccaatactgggctctgagtggctatgatattctgcaaggttatcccaaggatatatcaaactatggcttccccagcagcgtccaagcaattgacgcagctgttttctacagaagtaaaacatacttctttgtaaatgaccaattctggagatatgataaccaaagacaattcatggagccaggttatcccaaaagcatatcaggtgcctttccaggaatagagagtaaagttgatgcagttttccagcaagaacatttcttccatgtcttcagtggaccaagatattacgcatttgatcttattgctcagagagttaccagagttgcaagaggcaataaatggcttaactgtagatatggctgaagcaaaatcaaatgtggctgtatccactttcagaatgttgaagggaagttcagcatgcattttcgttacattgtgtcctgcttatacttttctcaatattaagtcattgtttcccatcactgtatccattctacctgtcctccgtgaaaatatgtttggaatattccactatttgcagaggcttattcagttcttacacattccatcttacattagtgattccatcaaagagaaggaaagtaagcctttttgtcacctcaatatttactatttcaatacttacatatctgacttctaggatttattgttatattacttgcctatctgacttcatacatccctcagtttcttaaaatgtcctatgtatatcttctacatgcaatttagaactagattttggttagaagtaaggattataaacaacctagacagtacccttggcctttacagaaaatatggtgctgttttctacccttggaaagaaatgtagatgatatgtttcgtgggttgaattgtgtcccccataaaagatatgttgaagttctaaccccaggtacccatgaatgtgagcttaccagggtctttgcagatgtaattagttaagttaaggtgagatcacactgaattagggtgggctctaaatccattatgactgttgttcttataagaagaagagagcatagccacctaggggaggaggccgtgtgaagacagaggcagagattggagtgacgcatctccaagccaa

SEQ ID NO: 16 - protein, 467 aa, Homo sapiens [sequence omitted]

SEQ ID NO: 17 - protein, 447 aa, Homo sapiens
  Pro-MMP-8
FPVSSKEKNTKTVQDYLEKFYQLPSNQYQSTRKNGTNVIVEKLKEMQRFFGLNVTGKPNEETLDMMKKPRCGVPDSGGFMLTPGNPKWERTNLTYRIRNYTPQLSEAEVERAIKDAFELWSVASPLIFTRISQGEADINIAFYQRDHGDNSPFDGPNGILAHAFQPGQGIGGDAHFDAEETWTNTSANYNLFLVAAHEFGHSLGLAHSSDPGALMYPNYAFRETSNYSLPQDDIDGIQAIYGLSSNPIQPTGPSTPKPCDPSLTFDAITTLRGEILFFKDRYFWRRHPQLQRVEMNFISLFWPSLPTGIQAAYEDFDRDLIFLFKGNQYWALSGYDILQGYPKDISNYGFPSSVQAIDAAVFYRSKTYFFVNDQFWRYDNQRQFMEPGYPKSISGAFPGIESKVDAVFQQEHFFHVFSGPRYYAFDLIAQRVTRVARGNKWLNCRYG

SEQ ID NO: 18 - DNA, 2722 bp, Homo sapiens
  MMP-13
  CDS (29)...(1444): Pre-pro-MMP-13 coding sequence
caacagtccccaggcatcaccattcaagatgcatccaggggtcctggctgccttcctcttcttgagctggactcattgtcgggccctgccccttcccagtggtggtgatgaagatgatttgtctgaggaagacctccagtttgcagagcgctacctgagatcatactaccatcctacaaatctcgcgggaatcctgaaggagaatgcagcaagctccatgactgagaggctccgagaaatgcagtctttcttcggcttagaggtgactggcaaacttgacgataacaccttagatgtcatgaaaaagccaagatgcggggttcctgatgtgggtgaatacaatgttttccctcgaactcttaaatggtccaaaatgaatttaacctacagaattgtgaattacacccctgatatgactcattctgaagtcgaaaaggcattcaaaaaagccttcaaagtttggtccgatgtaactcctctgaattttaccagacttcacgatggcattgctgacatcatgatctcttttggaattaaggagcatggcgacttctacccatttgatgggccctctggcctgctggctcatgcttttcctcctgggccaaattatggaggagatgcccattttgatgatgatgaaacctggacaagtagttccaaaggctacaacttgtttcttgttgctgcgcatgagttcggccactccttaggtcttgaccactccaaggaccctggagcactcatgtttcctatctacacctacaccggcaaaagccactttatgcttcctgatgacgatgtacaagggatccagtctctctatggtccaggagatgaagaccccaaccctaaacatccaaaaacgccagacaaatgtgacccttccttatcccttgatgccattaccagtctccgaggagaaacaatgatctttaaagacagattcttctggcgcctgcatcctcagcaggttgatgcggagctgtttttaacgaaatcattttggccagaacttcccaaccgtattgatgctgcatatgagcacccttctcatgacctcatcttcatcttcagaggtagaaaattttgggctcttaatggttatgacattctggaaggttatcccaaaaaaatatctgaactgggtcttccaaaagaagttaagaagataagtgcagctgttcactttgaggatacaggcaagactctcctgttctcaggaaaccaggtctggagatatgatgatactaaccatattatggataaagactatccgagactaatagaagaagacttcccaggaattggtgataaagtagatgctgtctatgagaaaaatggttatatctattttttcaacggacccatacagtttgaatacagcatctggagtaaccgtattgttcgcgtcatgccagcaaattccattttgtggtgttaagtgtctttttaaaaattgttatttaaatcctgaagagcatttggggtaatacttccagaagtgcggggtaggggaagaagagctatcaggagaaagcttggttctgtgaacaagcttcagtaagttatctttgaatatgtagtatctatatgactatgcgtggctggaaccacattgaagaatgttagagtaatgaaatggaggatctctaaagagcatctgattcttgttgctgtacaaaagcaatggttgatgatacttcccacaccacaaatgggacacatggtctgtcaatgagagcataatttaaaaatatatttataaggaaattttacaagggcataaagtaaatacatgcatataatgaataaatcattcttactaaaaagtataaaatagtatgaaaatggaaatttgggagagccatacataaaagaaataaaccaaaggaaaatgtctgtaataatagactgtaacttccaaataaataattttcattttgcactgaggatattcagatgtatgtgcccttcttcacacagacactaacgaaatatcaaagtcattaaagacaggagacaaaagagcagtggtaagaatagtagatgtggcctttgaattctgtttaattttcacttttggcaatgactcaaagtctgctctcatataagacaaatattcctttgcatattataaaggataaagaaggatgatgtctttttattaaaatatttcaggttcttcagaagtcacacattacaaagttaaaattgttatcaaaatagtctaaggccatggcatccctttttcataaattatttgattatttaagactaaaagttgcattttaaccctattttacctagctaattatttaattgtccggtttgtcttggatatataggctattttctaaagacttgtatagcatgaaataaaatatatcttataaagtggaagtatgtatattaaaaaagagacatccaaatttttttttaaagcagtctactagattgtgatcccttgagatatggaaggatgcctttttttctctgcatttaaaaaaatcccccagcacttcccacagtgcctattgatacttggggagggtgcttggcacttattgaatatatgatcggccatcaagggaagaactattgtgctcagagacactgttgataaaaactcaggcaaagaaaatgaaatgcatatttgcaaagtgtattaggaagtgtttatgttgtttataataaaaatatattttcaacagaaaaaaaa

SEQ ID NO: 19 - protein, 471 aa, Homo sapiens
  Pre-pro-MMP-13
MHPGVLAAFLFLSWTHCRALPLPSGGDEDDLSEEDLQFAERYLRSYYHPTNLAGILKENAASSMTERLREMQSFFGLEVTGKLDDNTLDVMKKPRCGVPDVGEYNVFPRTLKWSKMNLTYRIVNYTPDMTHSEVEKAFKKAFKVWSDVTPLNFTRLHDGIADIMISFGIKEHGDFYPFDGPSGLLAHAFPPGPNYGGDAHFDDDETWTSSSKGYNLFLVAAHEFGHSLGLDHSKDPGALMFPIYTYTGKSHFMLPDDDVQGIQSLYGPGDEDPNPKHPKTPDKCDPSLSLDAITSLRGETMIFKDRFFWRLHPQQVDAELFLTKSFWPELPNRIDAAYEHPSHDLIFIFRGRKFWALNGYDILEGYPKKISELGLPKEVKKISAAVHFEDTGKTLLFSGNQVWRYDDTNHIMDKDYPRLIEEDFPGIGDKVDAVYEKNGYIYFFNGPIQFEYSIWSNRIVRVMPANSILWC

SEQ ID NO: 20 - protein, 452 aa, Homo sapiens
  Pro-MMP-13
LPLPSGGDEDDLSEEDLQFAERYLRSYYHPTNLAGILKENAASSMTERLREMQSFFGLEVTGKLDDNTLDVMKKPRCGVPDVGEYNVFPRTLKWSKMNLTYRIVNYTPDMTHSEVEKAFKKAFKVWSDVTPLNFTRLHDGIADIMISFGIKEHGDFYPFDGPSGLLAHAFPPGPNYGGDAHFDDDETWTSSSKGYNLFLVAAHEFGHSLGLDHSKDPGALMFPIYTYTGKSHFMLPDDDVQGIQSLYGPGDEDPNPKHPKTPDKCDPSLSLDAITSLRGETMIFKDRFFWRLHPQQVDAELFLTKSFWPELPNRIDAAYEHPSHDLIFIFRGRKFWALNGYDILEGYPKKISELGLPKEVKKISAAVHFEDTGKTLLFSGNQVWRYDDTNHIMDKDYPRLIEEDFPGIGDKVDAVYEKNGYIYFFNGPIQFEYSIWSNRIVRVMPANSILWC

SEQ ID NO: 21 - DNA, 1609 bp, Xenopus laevis
  MMP-18
  CDS (30)...(1433): Pre-pro-MMP-18 coding sequence
accttcaaatcctagaaagccttagaagaatgaacagcctcctgctaaagctgctactatgtgtagccattactgctgccttcccagcagataaacaagatgagcccccagcaacaaaggaagaaatggcagagaattacttgaagagattttacagtcttggaactgatgggggaccagttggaagaaagaaacacatccaacctttcactgaaaagctcgagcagatgcagaagttttttggcttaaaggtgacaggaacattggaccccaagactgtagaagtaatggagaaacccagatgtggagtctatgatgttggccagtacagcacagtcgcaaaaagttctgcatggcagaagaaggatctgacctacagaattctaaacttcactcctgacctgcctcaggctgatgtggagactgccatacaaagagctttcaaagtctggagtgacgtgacacctttgacctttaccagaatctacaatgaagtatcagatatagaaatctcctttacagctggagatcacaaagacaattctccttttgatggatctggtggcattttggcccatgcctttcagcccggcaatggcattggtggagatgcccattttgatgaagatgaaacctggacaaagaccagtgaaatatacaatctgtttcttgttgctgctcatgaatttggacactcgctggggctttctcattccactgatcagggtgctttgatgtatccaacatactcaaataccgaccccaagacatttcagcttcctcaagatgatatcaatgctatacagtatctatatggaaaatcctccaatccagtccaaccaaccggaccatccactccttccagatgtgatccaaatgttgttttcaatgctgtcaccaccatgagaggagaactgattttctttgtgaagaggtttttatggaggaagcatccccaagcatccgaggctgaactcatgtttgttcaagcattctggccatcgctgcccactaatattgatgcggcgtatgaaaatcctataacggagcagatccttgtgtttaaaggatcaaaatatacagctctggacggcttcgatgtagtacaaggttaccccaggaacatctacagcctgggatttccaaagaccgtgaaaagaattgatgcggctgttcatattgaacaactagggaaaacatatttctttgcagctaagaaatactggagttatgatgaagataaaaaacaaatggacaaaggctttccaaagcaaataagcaacgatttcccgggaattcctgataaaattgatgcagctttttattacagaggccgcctgtatttcttcattggaaggagccagtttgaatacaatatcaactctaaaagaatcgtacaggtcttaagaagcaacagctggttgggctgttaataagacggaccccaagctctgtaacaagggcaacgatgaatgtgatggcagctcatttctgcacctgccgtgtgaccaatattatttaaaatcatttcctttgaatgtttgactttatttaatctttatgaattaatattttgtactcatgttgttttaataaaaacgttttgttt

SEQ ID NO: 22 - protein, 467 aa, Xenopus laevis
  Pre-pro-MMP-18
MNSLLLKLLLCVAITAAFPADKQDEPPATKEEMAENYLKRFYSLGTDGGPVGRKKHIQPFTEKLEQMQKFFGLKVTGTLDPKTVEVMEKPRCGVYDVGQYSTVAKSSAWQKKDLTYRILNFTPDLPQADVETAIQRAFKVWSDVTPLTFTRIYNEVSDIEISFTAGDHKDNSPFDGSGGILAHAFQPGNGIGGDAHFDEDETWTKTSEIYNLFLVAAHEFGHSLGLSHSTDQGALMYPTYSNTDPKTFQLPQDDINAIQYLYGKSSNPVQPTGPSTPSRCDPNVVFNAVTTMRGELIFFVKRFLWRKHPQASEAELMFVQAFWPSLPTNIDAAYENPITEQILVFKGSKYTALDGFDVVQGYPRNIYSLGFPKTVKRIDAAVHIEQLGKTYFFAAKKYWSYDEDKKQMDKGFPKQISNDFPGIPDKIDAAFYYRGRLYFFIGRSQFEYNINSKRIVQVLRSNSWLGC

SEQ ID NO: 23 - protein, 450 aa, Xenopus laevis
  Pro-MMP-18
FPADKQDEPPATKEEMAENYLKRFYSLGTDGGPVGRKKHIQPFTEKLEQMQKFFGLKVTGTLDPKTVEVMEKPRCGVYDVGQYSTVAKSSAWQKKDLTYRILNFTPDLPQADVETAIQRAFKVWSDVTPLTFTRIYNEVSDIEISFTAGDHKDNSPFDGSGGILAHAFQPGNGIGGDAHFDEDETWTKTSEIYNLFLVAAHEFGHSLGLSHSTDQGALMYPTYSNTDPKTFQLPQDDINAIQYLYGKSSNPVQPTGPSTPSRCDPNVVFNAVTTMRGELIFFVKRFLWRKHPQASEAELMFVQAFWPSLPTNIDAAYENPITEQILVFKGSKYTALDGFDVVQGYPRNIYSLGFPKTVKRIDAAVHIEQLGKTYFFAAKKYWSYDEDKKQMDKGFPKQISNDFPGIPDKIDAAFYYRGRLYFFIGRSQFEYNINSKRIVQVLRSNSWLGC

SEQ ID NO: 24 - DNA, 3546 bp, Homo sapiens
  MMP-2
  CDS (305)...(2287): Pre-pro-MMP-2 coding sequence
gcggctgccctcccttgtttccgctgcatccagacttcctcaggcggtggctggaggctgcgcatctggggctttaaacatacaaagggattgccaggacctgcggcggcggcggcggcggcgggggctggggcgcgggggccggaccatgagccgctgagccgggcaaaccccaggccaccgagccagcggaccctcggagcgcagccctgcgccgcggagcaggctccaaccaggcggcgaggcggccacacgcaccgagccagcgacccccgggcgacgcgcggggccagggagcgctacgatggaggcgctaatggcccggggcgcgctcacgggtcccctgagggcgctctgtctcctgggctgcctgctgagccacgccgccgccgcgccgtcgcccatcatcaagttccccggcgatgtcgcccccaaaacggacaaagagttggcagtgcaatacctgaacaccttctatggctgccccaaggagagctgcaacctgtttgtgctgaaggacacactaaagaagatgcagaagttctttggactgccccagacaggtgatcttgaccagaataccatcgagaccatgcggaagccacgctgcggcaacccagatgtggccaactacaacttcttccctcgcaagcccaagtgggacaagaaccagatcacatacaggatcattggctacacacctgatctggacccagagacagtggatgatgcctttgctcgtgccttccaagtctggagcgatgtgaccccactgcggttttctcgaatccatgatggagaggcagacatcatgatcaactttggccgctgggagcatggcgatggatacccctttgacggtaaggacggactcctggctcatgccttcgccccaggcactggtgttgggggagactcccattttgatgacgatgagctatggaccttgggagaaggccaagtggtccgtgtgaagtatgggaacgccgatggggagtactgcaagttccccttcttgttcaatggcaaggagtacaacagctgcactgataccggccgcagcgatggcttcctctggtgctccaccacctacaactttgagaaggatggcaagtacggcttctgtccccatgaagccctgttcaccatgggcggcaacgctgaaggacagccctgcaagtttccattccgcttccagggcacatcctatgacagctgcaccactgagggccgcacggatggctaccgctggtgcggcaccactgaggactacgaccgcgacaagaagtatggcttctgccctgagaccgccatgtccactgttggtgggaactcagaaggtgccccctgtgtcttccccttcactttcctgggcaacaaatatgagagctgcaccagcgccggccgcagtgacggaaagatgtggtgtgcgaccacagccaactacgatgatgaccgcaagtggggcttctgccctgaccaagggtacagcctgttcctcgtggcagcccacgagtttggccacgccatggggctggagcactcccaagaccctggggccctgatggcacccatttacacctacaccaagaacttccgtctgtcccaggatgacatcaagggcattcaggagctctatggggcctctcctgacattgaccttggcaccggccccacccccacgctgggccctgtcactcctgagatctgcaaacaggacattgtatttgatggcatcgctcagatccgtggtgagatcttcttcttcaaggaccggttcatttggcggactgtgacgccacgtgacaagcccatggggcccctgctggtggccacattctggcctgagctcccggaaaagattgatgcggtatacgaggccccacaggaggagaaggctgtgttctttgcagggaatgaatactggatctactcagccagcaccctggagcgagggtaccccaagccactgaccagcctgggactgccccctgatgtccagcgagtggatgccgcctttaactggagcaaaaacaagaagacatacatctttgctggagacaaattctggagatacaatgaggtgaagaagaaaatggatcctggcttccccaagctcatcgcagatgcctggaatgccatccccgataacctggatgccgtcgtggacctgcagggcggcggtcacagctacttcttcaagggtgcctattacctgaagctggagaaccaaagtctgaagagcgtgaagtttggaagcatcaaatccgactggctaggctgctgagctggccctggctcccacaggcccttcctctccactgccttcgatacaccgggcctggagaactagagaaggacccggaggggcctggcagccgtgccttcagctctacagctaatcagcattctcactcctacctggtaatttaagattccagagagtggctcctcccggtgcccaagaatagatgctgactgtactcctcccaggcgccccttccccctccaatcccaccaaccctcagagccacccctaaagagatactttgatattttcaacgcagccctgctttgggctgccctggtgctgccacacttcaggctcttctcctttcacaaccttctgtggctcacagaacccttggagccaatggagactgtctcaagagggcactggtggcccgacagcctggcacagggcagtgggacagggcatggccaggtggccactccagacccctggcttttcactgctggctgccttagaacctttcttacattagcagtttgctttgtatgcactttgtttttttctttgggtcttgttttttttttccacttagaaattgcatttcctgacagaaggactcaggttgtctgaagtcactgcacagtgcatctcagcccacatagtgatggttcccctgttcactctacttagcatgtccctaccgagtctcttctccactggatggaggaaaaccaagccgtggcttcccgctcagccctccctgcccctcccttcaaccattccccatgggaaatgtcaacaagtatgaataaagacacctactgagtggccgtgtttgccatctgttttagcagagcctagacaagggccacagacccagccagaagcggaaacttaaaaagtccgaatctctgctccctgcagggcacaggtgatggtgtctgctggaaaggtcagagcttccaaagtaaacagcaagagaacctcagggagagtaagctctagtccctctgtcctgtagaaagagccctgaagaatcagcaattttgttgctttattgtggcatctgttcgaggtttgcttcctctttaagtctgtttcttcattagcaatcatatcagttttaatgctactactaacaatgaacagtaacaataatatccccctcaattaatagagtgctttctatgtgcaaggcacttttcacgtgtcacctattttaacctttccaaccacataaataaaaaaggccattattagttgaatcttattgatgaagagaaaaaaaaaaa

SEQ ID NO: 25 - protein, 660 aa, Homo sapiens
  Pre-pro-MMP-2
MEALMARGALTGPLRALCLLGCLLSHAAAAPSPIIKFPGDVAPKTDKELAVQYLNTFYGCPKESCNLFVLKDTLKKMQKFFGLPQTGDLDQNTIETMRKPRCGNPDVANYNFFPRKPKWDKNQITYRIIGYTPDLDPETVDDAFARAFQVWSDVTPLRFSRIHDGEADIMINFGRWEHGDGYPFDGKDGLLAHAFAPGTGVGGDSHFDDDELWTLGEGQVVRVKYGNADGEYCKFPFLFNGKEYNSCTDTGRSDGFLWCSTTYNFEKDGKYGFCPHEALFTMGGNAEGQPCKFPFRFQGTSYDSCTTEGRTDGYRWCGTTEDYDRDKKYGFCPETAMSTVGGNSEGAPCVFPFTFLGNKYESCTSAGRSDGKMWCATTANYDDDRKWGFCPDQGYSLFLVAAHEFGHAMGLEHSQDPGALMAPIYTYTKNFRLSQDDIKGIQELYGASPDIDLGTGPTPTLGPVTPEICKQDIVFDGIAQIRGEIFFFKDRFIWRTVTPRDKPMGPLLVATFWPELPEKIDAVYEAPQEEKAVFFAGNEYWIYSASTLERGYPKPLTSLGLPPDVQRVDAAFNWSKNKKTYIFAGDKFWRYNEVKKKMDPGFPKLIADAWNAIPDNLDAVVDLQGGGHSYFFKGAYYLKLENQSLKSVKFGSIKSDWLGC

SEQ ID NO: 26 - protein, 631 aa, Homo sapiens
  Pro-MMP-2
APSPIIKFPGDVAPKTDKELAVQYLNTFYGCPKESCNLFVLKDTLKKMQKFFGLPQTGDLDQNTIETMRKPRCGNPDVANYNFFPRKPKWDKNQITYRIIGYTPDLDPETVDDAFARAFQVWSDVTPLRFSRIHDGEADIMINFGRWEHGDGYPFDGKDGLLAHAFAPGTGVGGDSHFDDDELWTLGEGQVVRVKYGNADGEYCKFPFLFNGKEYNSCTDTGRSDGFLWCSTTYNFEKDGKYGFCPHEALFTMGGNAEGQPCKFPFRFQGTSYDSCTTEGRTDGYRWCGTTEDYDRDKKYGFCPETAMSTVGGNSEGAPCVFPFTFLGNKYESCTSAGRSDGKMWCATTANYDDDRKWGFCPDQGYSLFLVAAHEFGHAMGLEHSQDPGALMAPIYTYTKNFRLSQDDIKGIQELYGASPDIDLGTGPTPTLGPVTPEICKQDIVFDGIAQIRGEIFFFKDRFIWRTVTPRDKPMGPLLVATFWPELPEKIDAVYEAPQEEKAVFFAGNEYWIYSASTLERGYPKPLTSLGLPPDVQRVDAAFNWSKNKKTYIFAGDKFWRYNEVKKKMDPGFPKLIADAWNAIPDNLDAVVDLQGGGHSYFFKGAYYLKLENQSLKSVKFGSIKSDWLGC

SEQ ID NO: 27 - DNA, 2387 bp, Homo sapiens
  MMP-9
  CDS (20)...(2143): Pre-pro-MMP-9 coding sequence
agacacctctgccctcaccatgagcctctggcagcccctggtcctggtgctcctggtgctgggctgctgctttgctgcccccagacagcgccagtccacccttgtgctcttccctggagacctgagaaccaatctcaccgacaggcagctggcagaggaatacctgtaccgctatggttacactcgggtggcagagatgcgtggagagtcgaaatctctggggcctgcgctgctgcttctccagaagcaactgtccctgcccgagaccggtgagctggatagcgccacgctgaaggccatgcgaaccccacggtgcggggtcccagacctgggcagattccaaacctttgagggcgacctcaagtggcaccaccacaacatcacctattggatccaaaactactcggaagacttgccgcgggcggtgattgacgacgcctttgcccgcgccttcgcactgtggagcgcggtgacgccgctcaccttcactcgcgtgtacagccgggacgcagacatcgtcatccagtttggtgtcgcggagcacggagacgggtatcccttcgacgggaaggacgggctcctggcacacgcctttcctcctggccccggcattcagggagacgcccatttcgacgatgacgagttgtggtccctgggcaagggcgtcgtggttccaactcggtttggaaacgcagatggcgcggcctgccacttccccttcatcttcgagggccgctcctactctgcctgcaccaccgacggtcgctccgacggcttgccctggtgcagtaccacggccaactacgacaccgacgaccggtttggcttctgccccagcgagagactctacacccaggacggcaatgctgatgggaaaccctgccagtttccattcatcttccaaggccaatcctactccgcctgcaccacggacggtcgctccgacggctaccgctggtgcgccaccaccgccaactacgaccgggacaagctcttcggcttctgcccgacccgagctgactcgacggtgatggggggcaactcggcgggggagctgtgcgtcttccccttcactttcctgggtaaggagtactcgacctgtaccagcgagggccgcggagatgggcgcctctggtgcgctaccacctcgaactttgacagcgacaagaagtggggcttctgcccggaccaaggatacagtttgttcctcgtggcggcgcatgagttcggccacgcgctgggcttagatcattcctcagtgccggaggcgctcatgtaccctatgtaccgcttcactgaggggccccccttgcataaggacgacgtgaatggcatccggcacctctatggtcctcgccctgaacctgagccacggcctccaaccaccaccacaccgcagcccacggctcccccgacggtctgccccaccggaccccccactgtccacccctcagagcgccccacagctggccccacaggtcccccctcagctggccccacaggtccccccactgctggcccttctacggccactactgtgcctttgagtccggtggacgatgcctgcaacgtgaacatcttcgacgccatcgcggagattgggaaccagctgtatttgttcaaggatgggaagtactggcgattctctgagggcagggggagccggccgcagggccccttccttatcgccgacaagtggcccgcgctgccccgcaagctggactcggtctttgaggagcggctctccaagaagcttttcttcttctctgggcgccaggtgtgggtgtacacaggcgcgtcggtgctgggcccgaggcgtctggacaagctgggcctgggagccgacgtggcccaggtgaccggggccctccggagtggcagggggaagatgctgctgttcagcgggcggcgcctctggaggttcgacgtgaaggcgcagatggtggatccccggagcgccagcgaggtggaccggatgttccccggggtgcctttggacacgcacgacgtcttccagtaccgagagaaagcctatttctgccaggaccgcttctactggcgcgtgagttcccggagtgagttgaaccaggtggaccaagtgggctacgtgacctatgacatcctgcagtgccctgaggactagggctcccgtcctgctttggcagtgccatgtaaatccccactgggaccaaccctggggaaggagccagtttgccggatacaaactggtattctgttctggaggaaagggaggagtggaggtgggctgggccctctcttctcacctttgttttttgttggagtgtttctaataaacttggattctctaacctttaaaaaaaaaaaaaaaaaaaaaaaaaaaaaaaaaaaaaaaaaaaaaaaaaaaa

SEQ ID NO: 28 - protein, 707 aa, Homo sapiens
  Pre-pro-MMP-9
MSLWQPLVLVLLVLGCCFAAPRQRQSTLVLFPGDLRTNLTDRQLAEEYLYRYGYTRVAEMRGESKSLGPALLLLQKQLSLPETGELDSATLKAMRTPRCGVPDLGRFQTFEGDLKWHHHNITYWIQNYSEDLPRAVIDDAFARAFALWSAVTPLTFTRVYSRDADIVIQFGVAEHGDGYPFDGKDGLLAHAFPPGPGIQGDAHFDDDELWSLGKGVVVPTRFGNADGAACHFPFIFEGRSYSACTTDGRSDGLPWCSTTANYDTDDRFGFCPSERLYTQDGNADGKPCQFPFIFQGQSYSACTTDGRSDGYRWCATTANYDRDKLFGFCPTRADSTVMGGNSAGELCVFPFTFLGKEYSTCTSEGRGDGRLWCATTSNFDSDKKWGFCPDQGYSLFLVAAHEFGHALGLDHSSVPEALMYPMYRFTEGPPLHKDDVNGIRHLYGPRPEPEPRPPTTTTPQPTAPPTVCPTGPPTVHPSERPTAGPTGPPSAGPTGPPTAGPSTATTVPLSPVDDACNVNIFDAIAEIGNQLYLFKDGKYWRFSEGRGSRPQGPFLIADKWPALPRKLDSVFEERLSKKLFFFSGRQVWVYTGASVLGPRRLDKLGLGADVAQVTGALRSGRGKMLLFSGRRLWRFDVKAQMVDPRSASEVDRMFPGVPLDTHDVFQYREKAYFCQDRFYWRVSSRSELNQVDQVGYVTYDILQCPED

SEQ ID NO: 29 - protein, 688 aa, Homo sapiens
  Pro-MMP-9
APRQRQSTLVLFPGDLRTNLTDRQLAEEYLYRYGYTRVAEMRGESKSLGPALLLLQKQLSLPETGELDSATLKAMRTPRCGVPDLGRFQTFEGDLKWHHHNITYWIQNYSEDLPRAVIDDAFARAFALWSAVTPLTFTRVYSRDADIVIQFGVAEHGDGYPFDGKDGLLAHAFPPGPGIQGDAHFDDDELWSLGKGVVVPTRFGNADGAACHFPFIFEGRSYSACTTDGRSDGLPWCSTTANYDTDDRFGFCPSERLYTQDGNADGKPCQFPFIFQGQSYSACTTDGRSDGYRWCATTANYDRDKLFGFCPTRADSTVMGGNSAGELCVFPFTFLGKEYSTCTSEGRGDGRLWCATTSNFDSDKKWGFCPDQGYSLFLVAAHEFGHALGLDHSSVPEALMYPMYRFTEGPPLHKDDVNGIRHLYGPRPEPEPRPPTTTTPQPTAPPTVCPTGPPTVHPSERPTAGPTGPPSAGPTGPPTAGPSTATTVPLSPVDDACNVNIFDAIAEIGNQLYLFKDGKYWRFSEGRGSRPQGPFLIADKWPALPRKLDSVFEERLSKKLFFFSGRQVWVYTGASVLGPRRLDKLGLGADVAQVTGALRSGRGKMLLFSGRRLWRFDVKAQMVDPRSASEVDRMFPGVPLDTHDVFQYREKAYFCQDRFYWRVSSRSELNQVDQVGYVTYDILQCPED

SEQ ID NO: 30 - DNA, 1828 bp, Homo sapiens
  MMP-3
  CDS (66)...(1499): Pre-pro-MMP-3 coding sequence
ctacaaggaggcaggcaagacagcaaggcatagagacaacatagagctaagtaaagccagtggaaatgaagagtcttccaatcctactgttgctgtgcgtggcagtttgctcagcctatccattggatggagctgcaaggggtgaggacaccagcatgaaccttgttcagaaatatctagaaaactactacgacctcaaaaaagatgtgaaacagtttgttaggagaaaggacagtggtcctgttgttaaaaaaatccgagaaatgcagaagttccttggattggaggtgacggggaagctggactccgacactctggaggtgatgcgcaagcccaggtgtggagttcctgatgttggtcacttcagaacctttcctggcatcccgaagtggaggaaaacccaccttacatacaggattgtgaattatacaccagatttgccaaaagatgctgttgattctgctgttgagaaagctctgaaagtctgggaagaggtgactccactcacattctccaggctgtatgaaggagaggctgatataatgatctcttttgcagttagagaacatggagacttttacccttttgatggacctggaaatgttttggcccatgcctatgcccctgggccagggattaatggagatgcccactttgatgatgatgaacaatggacaaaggatacaacagggaccaatttatttctcgttgctgctcatgaaattggccactccctgggtctctttcactcagccaacactgaagctttgatgtacccactctatcactcactcacagacctgactcggttccgcctgtctcaagatgatataaatggcattcagtccctctatggacctccccctgactcccctgagacccccctggtacccacggaacctgtccctccagaacctgggacgccagccaactgtgatcctgctttgtcctttgatgctgtcagcactctgaggggagaaatcctgatctttaaagacaggcacttttggcgcaaatccctcaggaagcttgaacctgaattgcatttgatctcttcattttggccatctcttccttcaggcgtggatgccgcatatgaagttactagcaaggacctcgttttcatttttaaaggaaatcaattctgggctatcagaggaaatgaggtacgagctggatacccaagaggcatccacaccctaggtttccctccaaccgtgaggaaaatcgatgcagccatttctgataaggaaaagaacaaaacatatttctttgtagaggacaaatactggagatttgatgagaagagaaattccatggagccaggctttcccaagcaaatagctgaagactttccagggattgactcaaagattgatgctgtttttgaagaatttgggttcttttatttctttactggatcttcacagttggagtttgacccaaatgcaaagaaagtgacacacactttgaagagtaacagctggcttaattgttgaaagagatatgtagaaggcacaatatgggcactttaaatgaagctaataattcttcacctaagtctctgtgaattgaaatgttcgttttctcctgcctgtgctgtgactcgagtcacactcaagggaacttgagcgtgaatctgtatcttgccggtcatttttatgttattacagggcattcaaatgggctgctgcttagcttgcaccttgtcacatagagtgatctttcccaagagaaggggaagcactcgtgtgcaacagacaagtgactgtatctgtgtagactatttgcttatttaataaagacgatttgtcagttattttatctt

SEQ ID NO: 31 - protein, 477 aa, Homo sapiens
  Pre-pro-MMP-3
MKSLPILLLLCVAVCSAYPLDGAARGEDTSMNLVQKYLENYYDLKKDVKQFVRRKDSGPVVKKIREMQKFLGLEVTGKLDSDTLEVMRKPRCGVPDVGHFRTFPGIPKWRKTHLTYRIVNYTPDLPKDAVDSAVEKALKVWEEVTPLTFSRLYEGEADIMISFAVREHGDFYPFDGPGNVLAHAYAPGPGINGDAHFDDDEQWTKDTTGTNLFLVAAHEIGHSLGLFHSANTEALMYPLYHSLTDLTRFRLSQDDINGIQSLYGPPPDSPETPLVPTEPVPPEPGTPANCDPALSFDAVSTLRGEILIFKDRHFWRKSLRKLEPELHLISSFWPSLPSGVDAAYEVTSKDLVFIFKGNQFWAIRGNEVRAGYPRGIHTLGFPPTVRKIDAAISDKEKNKTYFFVEDKYWRFDEKRNSMEPGFPKQIAEDFPGIDSKIDAVFEEFGFFYFFTGSSQLEFDPNAKKVTHTLKSNSWLNC

SEQ ID NO: 32 - protein, 460 aa, Homo Sapiens
  Pro-MMP-3
YPLDGAARGEDTSMNLVQKYLENYYDLKKDVKQFVRRKDSGPVVKKIREMQKFLGLEVTGKLDSDTLEVMRKPRCGVPDVGHFRTFPGIPKWRKTHLTYRIVNYTPDLPKDAVDSAVEKALKVWEEVTPLTFSRLYEGEADIMISFAVREHGDFYPFDGPGNVLAHAYAPGPGINGDAHFDDDEQWTKDTTGTNLFLVAAHEIGHSLGLFHSANTEALMYPLYHSLTDLTRFRLSQDDINGIQSLYGPPPDSPETPLVPTEPVPPEPGTPANCDPALSFDAVSTLRGEILIFKDRHFWRKSLRKLEPELHLISSFWPSLPSGVDAAYEVTSKDLVFIFKGNQFWAIRGNEVRAGYPRGIHTLGFPPTVRKIDAAISDKEKNKTYFFVEDKYWRFDEKRNSMEPGFPKQIAEDFPGIDSKIDAVFEEFGFFYFFTGSSQLEFDPNAKKVTHTLKSNSWLNC

SEQ ID NO: 33 - DNA, 1743 bp, Homo sapiens
  MMP-10
  CDS (23)...(1453): Pre-pro-MMP-10 coding sequence
aaagaaggtaagggcagtgagaatgatgcatcttgcattccttgtgctgttgtgtctgccagtctgctctgcctatcctctgagtggggcagcaaaagaggaggactccaacaaggatcttgcccagcaatacctagaaaagtactacaacctcgaaaaggatgtgaaacagtttagaagaaaggacagtaatctcattgttaaaaaaatccaaggaatgcagaagttccttgggttggaggtgacagggaagctagacactgacactctggaggtgatgcgcaagcccaggtgtggagttcctgacgttggtcacttcagctcctttcctggcatgccgaagtggaggaaaacccaccttacatacaggattgtgaattatacaccagatttgccaagagatgctgttgattctgccattgagaaagctctgaaagtctgggaagaggtgactccactcacattctccaggctgtatgaaggagaggctgatataatgatctctttcgcagttaaagaacatggagacttttactcttttgatggcccaggacacagtttggctcatgcctacccacctggacctgggctttatggagatattcactttgatgatgatgaaaaatggacagaagatgcatcaggcaccaatttattcctcgttgctgctcatgaacttggccactccctggggctctttcactcagccaacactgaagctttgatgtacccactctacaactcattcacagagctcgcccagttccgcctttcgcaagatgatgtgaatggcattcagtctctctacggacctccccctgcctctactgaggaacccctggtgcccacaaaatctgttccttcgggatctgagatgccagccaagtgtgatcctgctttgtccttcgatgccatcagcactctgaggggagaatatctgttctttaaagacagatatttttggcgaagatcccactggaaccctgaacctgaatttcatttgatttctgcattttggccctctcttccatcatatttggatgctgcatatgaagttaacagcagggacaccgtttttatttttaaaggaaatgagttctgggccatcagaggaaatgaggtacaagcaggttatccaagaggcatccataccctgggttttcctccaaccataaggaaaattgatgcagctgtttctgacaaggaaaagaagaaaacatacttctttgcagcggacaaatactggagatttgatgaaaatagccagtccatggagcaaggcttccctagactaatagctgatgactttccaggagttgagcctaaggttgatgctgtattacaggcatttggatttttctacttcttcagtggatcatcacagtttgagtttgaccccaatgccaggatggtgacacacatattaaagagtaacagctggttacattgctaggcgagatagggggaagacagatatgggtgtttttaataaatctaataattattcatctaatgtattatgagccaaaatggttaatttttcctgcatgttctgtgactgaagaagatgagccttgcagatatctgcatgtgtcatgaagaatgtttctggaattcttcacttgcttttgaattgcactgaacagaattaagaaatactcatgtgcaataggtgagagaatgtattttcatagatgtgttattacttcctcaataaaaagttttattttgggcctgttcctt

SEQ ID NO: 34 - protein, 476 aa, Homo sapiens
  Pre-pro-MMP-10
MMHLAFLVLLCLPVCSAYPLSGAAKEEDSNKDLAQQYLEKYYNLEKDVKQFRRKDSNLIVKKIQGMQKFLGLEVTGKLDTDTLEVMRKPRCGVPDVGHFSSFPGMPKWRKTHLTYRIVNYTPDLPRDAVDSAIEKALKVWEEVTPLTFSRLYEGEADIMISFAVKEHGDFYSFDGPGHSLAHAYPPGPGLYGDIHFDDDEKWTEDASGTNLFLVAAHELGHSLGLFHSANTEALMYPLYNSFTELAQFRLSQDDVNGIQSLYGPPPASTEEPLVPTKSVPSGSEMPAKCDPALSFDAISTLRGEYLFFKDRYFWRRSHWNPEPEFHLISAFWPSLPSYLDAAYEVNSRDTVFIFKGNEFWAIRGNEVQAGYPRGIHTLGFPPTIRKIDAAVSDKEKKKTYFFAADKYWRFDENSQSMEQGFPRLIADDFPGVEPKVDAVLQAFGFFYFFSGSSQFEFDPNARMVTHILKSNSWLHC

SEQ ID NO: 35 - protein, 459 aa, Homo sapiens
  Pro-MMP-10
YPLSGAAKEEDSNKDLAQQYLEKYYNLEKDVKQFRRKDSNLIVKKIQGMQKFLGLEVTGKLDTDTLEVMRKPRCGVPDVGHFSSFPGMPKWRKTHLTYRIVNYTPDLPRDAVDSAIEKALKVWEEVTPLTFSRLYEGEADIMISFAVKEHGDFYSFDGPGHSLAHAYPPGPGLYGDIHFDDDEKWTEDASGTNLFLVAAHELGHSLGLFHSANTEALMYPLYNSFTELAQFRLSQDDVNGIQSLYGPPPASTEEPLVPTKSVPSGSEMPAKCDPALSFDAISTLRGEYLFFKDRYFWRRSHWNPEPEFHLISAFWPSLPSYLDAAYEVNSRDTVFIFKGNEFWAIRGNEVQAGYPRGIHTLGFPPTIRKIDAAVSDKEKKKTYFFAADKYWRFDENSQSMEQGFPRLIADDFPGVEPKVDAVLQAFGFFYFFSGSSQFEFDPNARMVTHILKSNSWLHC

SEQ ID NO: 36 - DNA, 2247 bp, Homo sapiens
  MMP-11
  CDS (10)...(1476): Pre-pro-MMP-11 coding sequence
ccggggcggatggctccggccgcctggctccgcagcgcggccgcgcgcgccctcctgcccccgatgctgctgctgctgctccagccgccgccgctgctggcccgggctctgccgccggacgtccaccacctccatgccgagaggagggggccacagccctggcatgcagccctgcccagtagcccggcacctgcccctgccacgcaggaagccccccggcctgccagcagcctcaggcctccccgctgtggcgtgcccgacccatctgatgggctgagtgcccgcaaccgacagaagaggttcgtgctttctggcgggcgctgggagaagacggacctcacctacaggatccttcggttcccatggcagttggtgcaggagcaggtgcggcagacgatggcagaggccctaaaggtatggagcgatgtgacgccactcacctttactgaggtgcacgagggccgtgctgacatcatgatcgacttcgccaggtactggcatggggacgacctgccgtttgatgggcctgggggcatcctggcccatgccttcttccccaagactcaccgagaaggggatgtccacttcgactatgatgagacctggactatcggggatgaccagggcacagacctgctgcaggtggcagcccatgaatttggccacgtgctggggctgcagcacacaacagcagccaaggccctgatgtccgccttctacacctttcgctacccactgagtctcagcccagatgactgcaggggcgttcaacacctatatggccagccctggcccactgtcacctccaggaccccagccctgggcccccaggctgggatagacaccaatgagattgcaccgctggagccagacgccccgccagatgcctgtgaggcctcctttgacgcggtctccaccatccgaggcgagctctttttcttcaaagcgggctttgtgtggcgcctccgtgggggccagctgcagcccggctacccagcattggcctctcgccactggcagggactgcccagccctgtggacgctgccttcgaggatgcccagggccacatttggttcttccaaggtgctcagtactgggtgtacgacggtgaaaagccagtcctgggccccgcacccctcaccgagctgggcctggtgaggttcccggtccatgctgccttggtctggggtcccgagaagaacaagatctacttcttccgaggcagggactactggcgtttccaccccagcacccggcgtgtagacagtcccgtgccccgcagggccactgactggagaggggtgccctctgagatcgacgctgccttccaggatgctgatggctatgcctacttcctgcgcggccgcctctactggaagtttgaccctgtgaaggtgaaggctctggaaggcttcccccgtctcgtgggtcctgacttctttggctgtgccgagcctgccaacactttcctctgaccatggcttggatgccctcaggggtgctgacccctgccaggccacgaatatcaggctagagacccatggccatctttgtggctgtgggcaccaggcatgggactgagcccatgtctcctgcagggggatggggtggggtacaaccaccatgacaactgccgggagggccacgcaggtcgtggtcacctgccagcgactgtctcagactgggcagggaggctttggcatgacttaagaggaagggcagtcttgggacccgctatgcaggtcctggcaaacctggctgccctgtctcatccctgtccctcagggtagcaccatggcaggactgggggaactggagtgtccttgctgtatccctgttgtgaggttccttccaggggctggcactgaagcaagggtgctggggccccatggccttcagccctggctgagcaactgggctgtagggcagggccacttcctgaggtcaggtcttggtaggtgcctgcatctgtctgccttctggctgacaatcctggaaatctgttctccagaatccaggccaaaaagttcacagtcaaatggggaggggtattcttcatgcaggagaccccaggccctggaggctgcaacatacctcaatcctgtcccaggccggatcctcctgaagcccttttcgcagcactgctatcctccaaagccattgtaaatgtgtgtacagtgtgtataaaccttcttcttcttttttttttttaaactgaggattgtcattaaacacagttgttttct

SEQ ID NO: 37 - protein, 488 aa, Homo sapiens
  Pre-pro-MMP-11
MAPAAWLRSAAARALLPPMLLLLLQPPPLLARALPPDVHHLHAERRGPQPWHAALPSSPAPAPATQEAPRPASSLRPPRCGVPDPSDGLSARNRQKRFVLSGGRWEKTDLTYRILRFPWQLVQEQVRQTMAEALKVWSDVTPLTFTEVHEGRADIMIDFARYWHGDDLPFDGPGGILAHAFFPKTHREGDVHFDYDETWTIGDDQGTDLLQVAAHEFGHVLGLQHTTAAKALMSAFYTFRYPLSLSPDDCRGVQHLYGQPWPTVTSRTPALGPQAGIDTNEIAPLEPDAPPDACEASFDAVSTIRGELFFFKAGFVWRLRGGQLQPGYPALASRHWQGLPSPVDAAFEDAQGHIWFFQGAQYWVYDGEKPVLGPAPLTELGLVRFPVHAALVWGPEKNKIYFFRGRDYWRFHPSTRRVDSPVPRRATDWRGVPSEIDAAFQDADGYAYFLRGRLYWKFDPVKVKALEGFPRLVGPDFFGCAEPANTFL

SEQ ID NO: 38 - protein, 457 aa, Homo sapiens
  Pro-MMP-11
RALPPDVHHLHAERRGPQPWHAALPSSPAPAPATQEAPRPASSLRPPRCGVPDPSDGLSARNRQKRFVLSGGRWEKTDLTYRILRFPWQLVQEQVRQTMAEALKVWSDVTPLTFTEVHEGRADIMIDFARYWHGDDLPFDGPGGILAHAFFPKTHREGDVHFDYDETWTIGDDQGTDLLQVAAHEFGHVLGLQHTTAAKALMSAFYTFRYPLSLSPDDCRGVQHLYGQPWPTVTSRTPALGPQAGIDTNEIAPLEPDAPPDACEASFDAVSTIRGELFFFKAGFVWRLRGGQLQPGYPALASRHWQGLPSPVDAAFEDAQGHIWFFQGAQYWVYDGEKPVLGPAPLTELGLVRFPVHAALVWGPEKNKIYFFRGRDYWRFHPSTRRVDSPVPRRATDWRGVPSEIDAAFQDADGYAYFLRGRLYWKFDPVKVKALEGFPRLVGPDFFGCAEPANTFL

SEQ ID NO: 39 - DNA, 1147 bp, Homo sapiens
  MMP-7
  CDS (48)...(851): Pre-pro-MMP-7 coding sequence
accaaatcaaccataggtccaagaacaattgtctctggacggcagctatgcgactcaccgtgctgtgtgctgtgtgcctgctgcctggcagcctggccctgccgctgcctcaggaggcgggaggcatgagtgagctacagtgggaacaggctcaggactatctcaagagattttatctctatgactcagaaacaaaaaatgccaacagtttagaagccaaactcaaggagatgcaaaaattctttggcctacctataactggaatgttaaactcccgcgtcatagaaataatgcagaagcccagatgtggagtgccagatgttgcagaatactcactatttccaaatagcccaaaatggacttccaaagtggtcacctacaggatcgtatcatatactcgagacttaccgcatattacagtggatcgattagtgtcaaaggctttaaacatgtggggcaaagagatccccctgcatttcaggaaagttgtatggggaactgctgacatcatgattggctttgcgcgaggagctcatggggactcctacccatttgatgggccaggaaacacgctggctcatgcctttgcgcctgggacaggtctcggaggagatgctcacttcgatgaggatgaacgctggacggatggtagcagtctagggattaacttcctgtatgctgcaactcatgaacttggccattctttgggtatgggacattcctctgatcctaatgcagtgatgtatccaacctatggaaatggagatccccaaaattttaaactttcccaggatgatattaaaggcattcagaaactatatggaaagagaagtaattcaagaaagaaatagaaacttcaggcagaacatccattcattcattcattggattgtatatcattgttgcacaatcagaattgataagcactgttcctccactccatttagcaattatgtcacccttttttattgcagttggtttttgaatgtctttcactccttttaaggataaactcctttatggtgtgactgtgtcttattcatctatacttgcagtgggtagatgtcaataaatgttacatacacaaataaataaaatgtttattccatggtaaatttaaaaaaaaaaaaaaaaaaaaaaaaaaaaa

SEQ ID NO: 40 - protein, 267 aa, Homo sapiens
  Pre-pro-MMP-7
MRLTVLCAVCLLPGSLALPLPQEAGGMSELQWEQAQDYLKRFYLYDSETKNANSLEAKLKEMQKFFGLPITGMLNSRVIEIMQKPRCGVPDVAEYSLFPNSPKWTSKVVTYRIVSYTRDLPHITVDRLVSKALNMWGKEIPLHFRKVVWGTADIMIGFARGAHGDSYPFDGPGNTLAHAFAPGTGLGGDAHFDEDERWTDGSSLGINFLYAATHELGHSLGMGHSSDPNAVMYPTYGNGDPQNFKLSQDDIKGIQKLYGKRSNSRKK

SEQ ID NO: 41 - protein, 250 aa, Homo sapiens
  Pro-MMP-7
LPLPQEAGGMSELQWEQAQDYLKRFYLYDSETKNANSLEAKLKEMQKFFGLPITGMLNSRVIEIMQKPRCGVPDVAEYSLFPNSPKWTSKVVTYRIVSYTRDLPHITVDRLVSKALNMWGKEIPLHFRKVVWGTADIMIGFARGAHGDSYPFDGPGNTLAHAFAPGTGLGGDAHFDEDERWTDGSSLGINFLYAATHELGHSLGMGHSSDPNAVMYPTYGNGDPQNFKLSQDDIKGIQKLYGKRSNSRKK

SEQ ID NO: 42 - DNA, 998 bp, Homo sapiens
  MMP-26
  CDS (19)...(804): Pre-pro-MMP-26
gacaaatgagggtttggcatgcagctcgtcatcttaagagttactatcttcttgccctggtgtttcgccgttccagtgccccctgctgcagaccataaaggatgggactttgttgagggctatttccatcaatttttcctgaccaagaaggagtcgccactccttacccaggagacacaaacacagctcctgcaacaattccatcggaatgggacagacctacttgacatgcagatgcatgctctgctacaccagccccactgtggggtgcctgatgggtccgacacctccatctcgccaggaagatgcaagtggaataagcacactctaacttacaggattatcaattacccacatgatatgaagccatccgcagtgaaagacagtatatataatgcagtttccatctggagcaatgtgacccctttgatattccagcaagtgcagaatggagatgcagacatcaaggtttctttctggcagtgggcccatgaagatggttggccctttgatgggccaggtggtatcttaggccatgcctttttaccaaattctggaaatcctggagttgtccattttgacaagaatgaacactggtcagcttcagacactggatataatctgttcctggttgcaactcatgagattgggcattctttgggcctgcagcactctgggaatcagagctccataatgtaccccacttactggtatcacgaccctagaaccttccagctcagtgccgatgatatccaaaggatccagcatttgtatggagaaaaatgttcatctgacataccttaatgttagcacagaggacttattcaacctgtcctttcagggagtttattggaggatcaaagaactgaaagcactagagcagccttggggactgctaggatgaagccctaaagaatgcaacctagtcaggttagctgaaccgacactcaaaacgctactgagtcacaataaagattgttttaaagagtaaaaaaaaa

SEQ ID NO: 43 - protein, 261 aa, Homo sapiens
  Pre-pro-MMP-26
MQLVILRVTIFLPWCFAVPVPPAADHKGWDFVEGYFHQFFLTKKESPLLTQETQTQLLQQFHRNGTDLLDMQMHALLHQPHCGVPDGSDTSISPGRCKWNKHTLTYRIINYPHDMKPSAVKDSIYNAVSIWSNVTPLIFQQVQNGDADIKVSFWQWAHEDGWPFDGPGGILGHAFLPNSGNPGVVHFDKNEHWSASDTGYNLFLVATHEIGHSLGLQHSGNQSSIMYPTYWYHDPRTFQLSADDIQRIQHLYGEKCSSDIP

SEQ ID NO: 44 - protein, 244 aa, Homo sapiens
  Pro-MMP-26
VPVPPAADHKGWDFVEGYFHQFFLTKKESPLLTQETQTQLLQQFHRNGTDLLDMQMHALLHQPHCGVPDGSDTSISPGRCKWNKHTLTYRIINYPHDMKPSAVKDSIYNAVSIWSNVTPLIFQQVQNGDADIKVSFWQWAHEDGWPFDGPGGILGHAFLPNSGNPGVVHFDKNEHWSASDTGYNLFLVATHEIGHSLGLQHSGNQSSIMYPTYWYHDPRTFQLSADDIQRIQHLYGEKCSSDIP

SEQ ID NO: 45 - DNA, 1825 bp, Homo sapiens
  MMP-12
  CDS (46)...(1458): Pre-pro-MMP-12 coding sequence
agaaaggaacacagtaaactgaattgatccgtttagaagtttacaatgaagtttcttctaatactgctcctgcaggccactgcttctggagctcttcccctgaacagctctacaagcctggaaaaaaataatgtgctatttggtgaaagatacttagaaaaattttatggccttgagataaacaaacttccagtgacaaaaatgaaatatagtggaaacttaatgaaggaaaaaatccaagaaatgcagcacttcttgggtctgaaagtgaccgggcaactggacacatctaccctggagatgatgcacgcacctcgatgtggagtccccgatgtccatcatttcagggaaatgccaggggggcccgtatggaggaaacattatatcacctacagaatcaataattacacacctgacatgaaccgtgaggatgttgactacgcaatccggaaagctttccaagtatggagtaatgttacccccttgaaattcagcaagattaacacaggcatggctgacattttggtggtttttgcccgtggagctcatggagacttccatgcttttgatggcaaaggtggaatcctagcccatgcttttggacctggatctggcattggaggggatgcacatttcgatgaggacgaattctggactacacattcaggaggcaccaacttgttcctcactgctgttcacgagattggccattccttaggtcttggccattctagtgatccaaaggccgtaatgttccccacctacaaatatgttgacatcaacacatttcgcctctctgctgatgacatacgtggcattcagtccctgtatggagacccaaaagagaaccaacgcttgccaaatcctgacaattcagaaccagctctctgtgaccccaatttgagttttgatgctgtcactaccgtgggaaataagatctttttcttcaaagacaggttcttctggctgaaggtttctgagagaccaaagaccagtgttaatttaatttcttccttatggccaaccttgccatctggcattgaagctgcttatgaaattgaagccagaaatcaagtttttctttttaaagatgacaaatactggttaattagcaatttaagaccagagccaaattatcccaagagcatacattcttttggttttcctaactttgtgaaaaaaattgatgcagctgtttttaacccacgtttttataggacctacttctttgtagataaccagtattggaggtatgatgaaaggagacagatgatggaccctggttatcccaaactgattaccaagaacttccaaggaatcgggcctaaaattgatgcagtcttctactctaaaaacaaatactactatttcttccaaggatctaaccaatttgaatatgacttcctactccaacgtatcaccaaaacactgaaaagcaatagctggtttggttgttagaaatggtgtaattaatggtttttgttagttcacttcagcttaataagtatttattgcatatttgctatgtcctcagtgtaccactacttagagatatgtatcataaaaataaaatctgtaaaccataggtaatgattatataaaatacataatatttttcaattttgaaaactctaattgtccattcttgcttgactctactattaagtttgaaaatagttaccttcaaaggccaagagaattctatttgaagcatgctctgtaagttgcttcctaacatccttggactgagaaattatacttacttctggcataactaaaattaagtatatatattttggctcaaataaaattgaaaaaaaaatca

SEQ ID NO: 46 - protein, 470 aa, Homo sapiens
  Pre-pro-MMP-12
MKFLLILLLQATASGALPLNSSTSLEKNNVLFGERYLEKFYGLEINKLPVTKMKYSGNLMKEKIQEMQHFLGLKVTGQLDTSTLEMMHAPRCGVPDVHHFREMPGGPVWRKHYITYRINNYTPDMNREDVDYAIRKAFQVWSNVTPLKFSKINTGMADILVVFARGAHGDFHAFDGKGGILAHAFGPGSGIGGDAHFDEDEFWTTHSGGTNLFLTAVHEIGHSLGLGHSSDPKAVMFPTYKYVDINTFRLSADDIRGIQSLYGDPKENQRLPNPDNSEPALCDPNLSFDAVTTVGNKIFFFKDRFFWLKVSERPKTSVNLISSLWPTLPSGIEAAYEIEARNQVFLFKDDKYWLISNLRPEPNYPKSIHSFGFPNFVKKIDAAVFNPRFYRTYFFVDNQYWRYDERRQMMDPGYPKLITKNFQGIGPKIDAVFYSKNKYYYFFQGSNQFEYDFLLQRITKTLKSNSWFGC

SEQ ID NO: 47 - protein, 454 aa, Homo sapiens
  Pro-MMP-12
LPLNSSTSLEKNNVLFGERYLEKFYGLEINKLPVTKMKYSGNLMKEKIQEMQHFLGLKVTGQLDTSTLEMMHAPRCGVPDVHHFREMPGGPVWRKHYITYRINNYTPDMNREDVDYAIRKAFQVWSNVTPLKFSKINTGMADILVVFARGAHGDFHAFDGKGGILAHAFGPGSGIGGDAHFDEDEFWTTHSGGTNLFLTAVHEIGHSLGLGHSSDPKAVMFPTYKYVDINTFRLSADDIRGIQSLYGDPKENQRLPNPDNSEPALCDPNLSFDAVTTVGNKIFFFKDRFFWLKVSERPKTSVNLISSLWPTLPSGIEAAYEIEARNQVFLFKDDKYWLISNLRPEPNYPKSIHSFGFPNFVKKIDAAVFNPRFYRTYFFVDNQYWRYDERRQMMDPGYPKLITKNFQGIGPKIDAVFYSKNKYYYFFQGSNQFEYDFLLQRITKTLKSNSWFGC

SEQ ID NO: 48 - DNA, 3558 bp, Homo sapiens
  MMP-14
  CDS (235)...(1983): Pre-pro-MMP-14
cagaccccagttcgccgactaagcagaagaaagatcaaaaaccggaaaagaggagaagagcaaacaggcactttgaggaacaatcccctttaactccaagccgacagcggtctaggaattcaagttcagtgcctaccgaagacaaaggcgccccgagggagtggcggtgcgaccccagggcgtgggcccggccgcggagcccacactgcccggctgacccggtggtctcggaccatgtctcccgccccaagacccccccgttgtctcctgctccccctgctcacgctcggcaccgcgctcgcctccctcggctcggcccaaagcagcagcttcagccccgaagcctggctacagcaatatggctacctgcctcccggggacctacgtacccacacacagcgctcaccccagtcactctcagcggccatcgctgccatgcagaagttttacggcttgcaagtaacaggcaaagctgatgcagacaccatgaaggccatgaggcgcccccgatgtggtgttccagacaagtttggggctgagatcaaggccaatgttcgaaggaagcgctacgccatccagggtctcaaatggcaacataatgaaatcactttctgcatccagaattacacccccaaggtgggcgagtatgccacatacgaggccattcgcaaggcgttccgcgtgtgggagagtgccacaccactgcgcttccgcgaggtgccctatgcctacatccgtgagggccatgagaagcaggccgacatcatgatcttctttgccgagggcttccatggcgacagcacgcccttcgatggtgagggcggcttcctggcccatgcctacttcccaggccccaacattggaggagacacccactttgactctgccgagccttggactgtcaggaatgaggatctgaatggaaatgacatcttcctggtggctgtgcacgagctgggccatgccctggggctcgagcattccagtgacccctcggccatcatggcacccttttaccagtggatggacacggagaattttgtgctgcccgatgatgaccgccggggcatccagcaactttatgggggtgagtcagggttccccaccaagatgccccctcaacccaggactacctcccggccttctgttcctgataaacccaaaaaccccacctatgggcccaacatctgtgacgggaactttgacaccgtggccatgctccgaggggagatgtttgtcttcaaggagcgctggttctggcgggtgaggaataaccaagtgatggatggatacccaatgcccattggccagttctggcggggcctgcctgcgtccatcaacactgcctacgagaggaaggatggcaaattcgtcttcttcaaaggagacaagcattgggtgtttgatgaggcgtccctggaacctggctaccccaagcacattaaggagctgggccgagggctgcctaccgacaagattgatgctgctctcttctggatgcccaatggaaagacctacttcttccgtggaaacaagtactaccgtttcaacgaagagctcagggcagtggatagcgagtaccccaagaacatcaaagtctgggaagggatccctgagtctcccagagggtcattcatgggcagcgatgaagtcttcacttacttctacaaggggaacaaatactggaaattcaacaaccagaagctgaaggtagaaccgggctaccccaagtcagccctgagggactggatgggctgcccatcgggaggccggccggatgaggggactgaggaggagacggaggtgatcatcattgaggtggacgaggagggcggcggggcggtgagcgcggctgccgtggtgctgcccgtgctgctgctgctcctggtgctggcggtgggccttgcagtcttcttcttcagacgccatgggacccccaggcgactgctctactgccagcgttccctgctggacaaggtctgacgcccaccgccggcccgcccactcctaccacaaggactttgcctctgaaggccagtggcagcaggtggtggtgggtgggctgctcccatcgtcccgagccccctccccgcagcctccttgcttctctctgtcccctggctggcctccttcaccctgaccgcctccctccctcctgccccggcattgcatcttccctagataggtcccctgagggctgagtgggagggcggccctttccagcctctgcccctcaggggaaccctgtagctttgtgtctgtccagccccatctgaatgtgttgggggctctgcacttgaaggcaggaccctcagacctcgctggtaaaggtcaaatggggtcatctgctccttttccatcccctgacataccttaacctctgaactctgacctcaggaggctctgggcactccagccctgaaagccccaggtgtacccaattggcagcctctcactactctttctggctaaaaggaatctaatcttgttgagggtagagaccctgagacagtgtgagggggtggggactgccaagccaccctaagaccttgggaggaaaactcagagagggtcttcgttgctcagtcagtcaagttcctcggagatctgcctctgcctcacctaccccagggaacttccaaggaaggagcctgagccactggggactaagtgggcagaagaaacccttggcagccctgtgcctctcgaatgttagccttggatggggctttcacagttagaagagctgaaaccaggggtgcagctgtcaggtagggtggggccggtgggagaggcccgggtcagagccctgggggtgagcctgaaggccacagagaaagaaccttgcccaaactcaggcagctggggctgaggcccaaaggcagaacagccagagggggcaggaggggaccaaaaaggaaaatgaggacgtgcagcagcattggaaggctggggccgggcaggccaggccaagccaagcagggggccacagggtgggctgtggagctctcaggaagggccctgaggaaggcacacttgctcctgttggtccctgtccttgctgcccaggcagcgtggaggggaagggtagggcagccagagaaaggagcagagaaggcacacaaacgaggaatgaggggcttcacgagaggccacagggcctggctggccacgctgtcccggcctgctcaccatctcagtgaggggcaggagctggggctcgcttaggctgggtccacgcttccctggtgccagcacccctcaagcctgtctcaccagtggcctgccctctcgctcccccacccagcccacccattgaagtctccttgggccaccaaaggtggtggccatggtaccggggacttgggagagtgagacccagtggagggagcaagaggagagggatgtcgggggggtggggcacggggtaggggaaatggggtgaacggtgctggcagttcggctagatttctgtcttgtttgtttttttgttttgtttaatgtatatttttattataattattatatatgaattccaaaaaaaaaaaaaaaaaaaaa

SEQ ID NO: 49 - protein, 582 aa, Homo sapiens
  Pre-pro-MMP-14
MSPAPRPPRCLLLPLLTLGTALASLGSAQSSSFSPEAWLQQYGYLPPGDLRTHTQRSPQSLSAAIAAMQKFYGLQVTGKADADTMKAMRRPRCGVPDKFGAEIKANVRRKRYAIQGLKWQHNEITFCIQNYTPKVGEYATYEAIRKAFRVWESATPLRFREVPYAYIREGHEKQADIMIFFAEGFHGDSTPFDGEGGFLAHAYFPGPNIGGDTHFDSAEPWTVRNEDLNGNDIFLVAVHELGHALGLEHSSDPSAIMAPFYQWMDTENFVLPDDDRRGIQQLYGGESGFPTKMPPQPRTTSRPSVPDKPKNPTYGPNICDGNFDTVAMLRGEMFVFKERWFWRVRNNQVMDGYPMPIGQFWRGLPASINTAYERKDGKFVFFKGDKHWVFDEASLEPGYPKHIKELGRGLPTDKIDAALFWMPNGKTYFFRGNKYYRFNEELRAVDSEYPKNIKVWEGIPESPRGSFMGSDEVFTYFYKGNKYWKFNNQKLKVEPGYPKSALRDWMGCPSGGRPDEGTEEETEVIIIEVDEEGGGAVSAAAVVLPVLLLLLVLAVGLAVFFFRRHGTPRRLLYCQRSLLDKV

SEQ ID NO: 50 - protein, 562 aa, homo sapiens
  Pro-MMP-14
ALASLGSAQSSSFSPEAWLQQYGYLPPGDLRTHTQRSPQSLSAAIAAMQKFYGLQVTGKADADTMKAMRRPRCGVPDKFGAEIKANVRRKRYAIQGLKWQHNEITFCIQNYTPKVGEYATYEAIRKAFRVWESATPLRFREVPYAYIREGHEKQADIMIFFAEGFHGDSTPFDGEGGFLAHAYFPGPNIGGDTHFDSAEPWTVRNEDLNGNDIFLVAVHELGHALGLEHSSDPSAIMAPFYQWMDTENFVLPDDDRRGIQQLYGGESGFPTKMPPQPRTTSRPSVPDKPKNPTYGPNICDGNFDTVAMLRGEMFVFKERWFWRVRNNQVMDGYPMPIGQFWRGLPASINTAYERKDGKFVFFKGDKHWVFDEASLEPGYPKHIKELGRGLPTDKIDAALFWMPNGKTYFFRGNKYYRFNEELRAVDSEYPKNIKVWEGIPESPRGSFMGSDEVFTYFYKGNKYWKFNNQKLKVEPGYPKSALRDWMGCPSGGRPDEGTEEETEVIIIEVDEEGGGAVSAAAVVLPVLLLLLVLAVGLAVFFFRRHGTPRRLLYCQRSLLDKV

SEQ ID NO: 51 - DNA, 4456 bp, Homo sapiens
  MMP-15
  CDS (974)...(2983): Pre-pro-MMP-15
acgactctttgatccctcccctaagacctccttcccgtccgcctaggcctcggtatcccccaccaggtatgagaaggaggagtcttcattcttcccaggcggggagaccacgccttccctgcctcctccctccgcggggggtcgcgttggaggtcacccccgccccctaggcgctgggttgggagtgacgcggggtgggctggagaggtttcctgccgtctgggaagcgtaaacggaccgcccacctgtcgggcctcggccgcccgcacctgcttgtgagaagcctgcggctggggcaccgcccccggtccccgcccgggtccgcgcattgggagcacactggccctttaagagcgcggcggccgcggcgcgcggggaggagggctgggagcgcccggagccgcgctgaactcgccggggacgtcgggcgcccgctccttggctggctcgcttgctctctcgctcgctctctcgggtcggctccctgcgcctcctcccgggactgcttggggacccgggcccggtcgggcgcggcggcgagcagaatccccgtgcaggaggcgcgcgctccgggcagcgcccggccccgggcatggacagagggagctgggcgcgcagggagcgccgcgggaccgggcggccggagcgctgagccagacaaaggctccggagttgcgcttgctctcgggagccgggccccaggcgctgggcgccgaggctgcggaacctcgccgggggcagctccggtcggccccctttcccgccggctggttccgagctcccggacctgccctgcccgcttctcctcgggcttgggaatttgccgaggcgacctaggcggctccggcggggaccgggagcccgaggtccgcggcgcgcctgccgggccaggagccagggagcgtcgcaagtttccaaggcgcgtgcgaggatccggcgtgcagtgttccgagctgggctgggcgccgagagcatgggcagcgacccgagcgcgcccggacggccgggctggacgggcagcctcctcggcgaccgggaggaggcggcgcggccgcgactgctgccgctgctcctggtgcttctgggctgcctgggccttggcgtagcggccgaagacgcggaggtccatgccgagaactggctgcggctttatggctacctgcctcagcccagccgccatatgtccaccatgcgttccgcccagatcttggcctcggcccttgcagagatgcagcgcttctacgggatcccagtcaccggtgtgctcgacgaagagaccaaggagtggatgaagcggccccgctgtggggtgccagaccagttcggggtacgagtgaaagccaacctgcggcggcgtcggaagcgctacgccctcaccgggaggaagtggaacaaccaccatctgacctttagcatccagaactacacggagaagttgggctggtaccactcgatggaggcggtgcgcagggccttccgcgtgtgggagcaggccacgcccctggtcttccaggaggtgccctatgaggacatccggctgcggcgacagaaggaggccgacatcatggtactctttgcctctggcttccacggcgacagctcgccgtttgatggcaccggtggctttctggcccacgcctatttccctggccccggcctaggcggggacacccattttgacgcagatgagccctggaccttctccagcactgacctgcatggaaacaacctcttcctggtggcagtgcatgagctgggccacgcgctggggctggagcactccagcaaccccaatgccatcatggcgccgttctaccagtggaaggacgttgacaacttcaagctgcccgaggacgatctccgtggcatccagcagctctacggtaccccagacggtcagccacagcctacccagcctctccccactgtgacgccacggcggccaggccggcctgaccaccggccgccccggcctccccagccaccacccccaggtgggaagccagagcggcccccaaagccgggccccccagtccagccccgagccacagagcggcccgaccagtatggccccaacatctgcgacggggactttgacacagtggccatgcttcgcggggagatgttcgtgttcaagggccgctggttctggcgagtccggcacaaccgcgtcctggacaactatcccatgcccatcgggcacttctggcgtggtctgcccggtgacatcagtgctgcctacgagcgccaagacggtcgttttgtctttttcaaaggtgaccgctactggctctttcgagaagcgaacctggagcccggctacccacagccgctgaccagctatggcctgggcatcccctatgaccgcattgacacggccatctggtgggagcccacaggccacaccttcttcttccaagaggacaggtactggcgcttcaacgaggagacacagcgtggagaccctgggtaccccaagcccatcagtgtctggcaggggatccctgcctcccctaaaggggccttcctgagcaatgacgcagcctacacctacttctacaagggcaccaaatactggaaattcgacaatgagcgcctgcggatggagcccggctaccccaagtccatcctgcgggacttcatgggctgccaggagcacgtggagccaggcccccgatggcccgacgtggcccggccgcccttcaacccccacgggggtgcagagcccggggcggacagcgcagagggcgacgtgggggatggggatggggactttggggccggggtcaacaaggacgggggcagccgcgtggtggtgcagatggaggaggtggcacggacggtgaacgtggtgatggtgctggtgccactgctgctgctgctctgcgtcctgggcctcacctacgcgctggtgcagatgcagcgcaagggtgcgccacgtgtcctgctttactgcaagcgctcgctgcaggagtgggtctgaccacccagcgctcctgctaacggtgctcagggggcgcctgtggttctgagatggctcccaggggctccctccgcccccaggtaggggcccctctcagccctcacacaccctgtctgccccgccctcattatttatgtccaggtgtttgttttgttttgtttttggcaccttacttgaccatttgtttctgtttccccgactggggcagggtgtttagaattttctaaatgtagttctgctccagacagggaattaggcccccatcatcctctggcttggccacagccaggggagcagaggggcagaggcccacattggaagagcagcacctcctcagcctgaaccccagggctgtaactgccaggctctctttgcccagttggagactgtctggcccccctggtcccctccttcccaagtgagtctctctgggccttaggaagagccttccacccaggggcagccccaggccaaaggggacctggaagggaggtgggccgtggcccttgagtccccattgaggcttggttccttcccaatccagtggacttcgcagtccacttctgacagcctcagtgaccctggctccttgtgccagagaacccagcccacccccggcagcagcccccagctcccacctccccttgggcccacacctccttccctctctggagaaagggccctgggcctgcctcaccacggaccaaagggagtctgccagggcccctctccccagggaagcagcagcctcgcccctggcagagatgcctccctgagctagaaccctctgttccttccctgtgcctcctccctccctctccgactcacaccactagcctcaggggtctgagctccagctcctttgggcttcagctgccagtgtcctgagccccagggagagggggctggtgggtgcctaggcctgggcagtggatggccgtgaatgggtgcccacagtgtcaggcactgggcatgaggggttcctcccctccagctccctgtgcccccagggtcctgggaggagagacactggtggggataggccagccgcgcatcagactgtgaaccccacgaaggagcccattgtggcctaagaggctgccctcctgtgctcagccctgaggacagatgcctccttcctcttttccttcccaaagcaagcaagaggccgtggctgctgtgggaaatggtactgtacagctggctctacttccccatggccctgagcgagtggagtctgccacccaggatccccaaggcacttgagggggaaggattctgctggcctctgcgagtggtttcttgtgcactggcaccaagtgcgggtccggcagcttctgccccctgcagaaccggagagccagctaaggggtggggctgcgggggttccgtgtccacccccatacatttatttctgtaaataatgtgcactgaataaattgtacagccggcaaaaaaaaaaaaaaaaaaaaa

SEQ ID NO: 52 - protein, 669 aa, Homo sapiens
  Pre-pro-MMP-15
MGSDPSAPGRPGWTGSLLGDREEAARPRLLPLLLVLLGCLGLGVAAEDAEVHAENWLRLYGYLPQPSRHMSTMRSAQILASALAEMQRFYGIPVTGVLDEETKEWMKRPRCGVPDQFGVRVKANLRRRRKRYALTGRKWNNHHLTFSIQNYTEKLGWYHSMEAVRRAFRVWEQATPLVFQEVPYEDIRLRRQKEADIMVLFASGFHGDSSPFDGTGGFLAHAYFPGPGLGGDTHFDADEPWTFSSTDLHGNNLFLVAVHELGHALGLEHSSNPNAIMAPFYQWKDVDNFKLPEDDLRGIQQLYGTPDGQPQPTQPLPTVTPRRPGRPDHRPPRPPQPPPPGGKPERPPKPGPPVQPRATERPDQYGPNICDGDFDTVAMLRGEMFVFKGRWFWRVRHNRVLDNYPMPIGHFWRGLPGDISAAYERQDGRFVFFKGDRYWLFREANLEPGYPQPLTSYGLGIPYDRIDTAIWWEPTGHTFFFQEDRYWRFNEETQRGDPGYPKPISVWQGIPASPKGAFLSNDAAYTYFYKGTKYWKFDNERLRMEPGYPKSILRDFMGCQEHVEPGPRWPDVARPPFNPHGGAEPGADSAEGDVGDGDGDFGAGVNKDGGSRVVVQMEEVARTVNVVMVLVPLLLLLCVLGLTYALVQMQRKGAPRVLLYCKRSLQEWV

SEQ ID NO: 53 - protein, 628 aa, Homo sapiens
  Pro-MMP-15
LGVAAEDAEVHAENWLRLYGYLPQPSRHMSTMRSAQILASALAEMQRFYGIPVTGVLDEETKEWMKRPRCGVPDQFGVRVKANLRRRRKRYALTGRKWNNHHLTFSIQNYTEKLGWYHSMEAVRRAFRVWEQATPLVFQEVPYEDIRLRRQKEADIMVLFASGFHGDSSPFDGTGGFLAHAYFPGPGLGGDTHFDADEPWTFSSTDLHGNNLFLVAVHELGHALGLEHSSNPNAIMAPFYQWKDVDNFKLPEDDLRGIQQLYGTPDGQPQPTQPLPTVTPRRPGRPDHRPPRPPQPPPPGGKPERPPKPGPPVQPRATERPDQYGPNICDGDFDTVAMLRGEMFVFKGRWFWRVRHNRVLDNYPMPIGHFWRGLPGDISAAYERQDGRFVFFKGDRYWLFREANLEPGYPQPLTSYGLGIPYDRIDTAIWWEPTGHTFFFQEDRYWRFNEETQRGDPGYPKPISVWQGIPASPKGAFLSNDAAYTYFYKGTKYWKFDNERLRMEPGYPKSILRDFMGCQEHVEPGPRWPDVARPPFNPHGGAEPGADSAEGDVGDGDGDFGAGVNKDGGSRVVVQMEEVARTVNVVMVLVPLLLLLCVLGLTYALVQMQRKGAPRVLLYCKRSLQEWV

SEQ ID NO: 54 - DNA, 6347 bp, Homo sapiens
  MMP-16
  CDS (283)...(2106): Pre-pro-MMP-16 coding sequence
tctttgagccggaaccgccggtgaacttaggcgccacgttcccggtgactgaccccggaggatggtgaacaggaactactgctgaccctgtcttcgccgctgcctctcgggggctgccgagcgcggggcccctgtctcctccccttgcccggctgtgggtgaacctgcaggctccttacccacccggaggacttttttttgaaaggaaacgagggagggagggagagggagagagggagaaaacgaaggggagctcgtccatccattgaagcacagttcactatgatcttactcacattcagcactggaagacggttggatttcgtgcatcattcgggggtgtttttcttgcaaaccttgctttggattttatgtgctacagtctgcggaacggagcagtatttcaatgtggaggtttggttacaaaagtacggctaccttccaccgactgaccccagaatgtcagtgctgcgctctgcagagaccatgcagtctgccctagctgccatgcagcagttctatggcattaacatgacaggaaaagtggacagaaacacaattgactggatgaagaagccccgatgcggtgtacctgaccagacaagaggtagctccaaatttcatattcgtcgaaagcgatatgcattgacaggacagaaatggcagcacaagcacatcacttacagtataaagaacgtaactccaaaagtaggagaccctgagactcgtaaagctattcgccgtgcctttgatgtgtggcagaatgtaactcctctgacatttgaagaagttccctacagtgaattagaaaatggcaaacgtgatgtggatataaccattatttttgcatctggtttccatggggacagctctccctttgatggagagggaggatttttggcacatgcctacttccctggaccaggaattggaggagatacccattttgactcagatgagccatggacactaggaaatcctaatcatgatggaaatgacttatttcttgtagcagtccatgaactgggacatgctctgggattggagcattccaatgaccccactgccatcatggctccattttaccagtacatggaaacagacaacttcaaactacctaatgatgatttacagggcatccagaagatatatggtccacctgacaagattcctccacctacaagacctctaccgacagtgcccccacaccgctctattcctccggctgacccaaggaaaaatgacaggccaaaacctcctcggcctccaaccggcagaccctcctatcccggagccaaacccaacatctgtgatgggaactttaacactctagctattcttcgtcgtgagatgtttgttttcaaggaccagtggttttggcgagtgagaaacaacagggtgatggatggatacccaatgcaaattacttacttctggcggggcttgcctcctagtatcgatgcagtttatgaaaatagcgacgggaattttgtgttctttaaaggtaacaaatattgggtgttcaaggatacaactcttcaacctggttaccctcatgacttgataacccttggaagtggaattccccctcatggtattgattcagccatttggtgggaggacgtcgggaaaacctatttcttcaagggagacagatattggagatatagtgaagaaatgaaaacaatggaccctggctatcccaagccaatcacagtctggaaagggatccctgaatctcctcagggagcatttgtacacaaagaaaatggctttacgtatttctacaaaggaaaggagtattggaaattcaacaaccagatactcaaggtagaacctggatatccaagatccatcctcaaggattttatgggctgtgatggaccaacagacagagttaaagaaggacacagcccaccagatgatgtagacattgtcatcaaactggacaacacagccagcactgtgaaagccatagctattgtcattccctgcatcttggccttatgcctccttgtattggtttacactgtgttccagttcaagaggaaaggaacaccccgccacatactgtactgtaaacgctctatgcaagagtgggtgtgatgtagggttttttcttctttctttcttttgcaggagtttgtggtaacttgagattcaagacaagagctgttatgctgtttcctagctaggagcaggcttgtggcagcctgattcggggctgacctttcaaacccagagggttgctggtcctgcacatgagtggaaatacactcatggggaagcttccatgatgcacagtatctgctgttcttcagtcctttgtctttctttgtcattcagttctaggcctttcctctgcacgctcaatgcccagtaaaatttcaggattaactaaagaagaggagaaaaagaagaaaagattcttcttaaaagtttctaatgttattttccttctgaagtctgagcccatttctggggggagaaaaaaaaagcaaatcagaaaacccacggtttttctttttttctttttttctttttttctttttttgctttaaaacaaagggaaaaaagagtttaaacaaaaaacccacaattgaacttccaggaaagtgtgaagacccaaaacagctttgtctccaaagaagatagctctctgactgctttggatagtctcctacgcaccattttgtcaggtgggagatttggaatacacatgcaggacgttagactgttgggacagccattttccaacaaccaaggggccaaaatatctgcaatatagtaacagccttaataatacatccatttttcgttttatacagctgttctcagctatgtcctcagtgtttcatcgcatttatattcatagctattttcaaacacgaccttttaattgtttttgaagtatttctaaaccccttctttccaccttactcctccatcattgtgataatcttcccaagttgtattaggccattgccccaggccttccatgggtctgtcaggaatattcgttacaaagcagagcaagaagcagtatgtctctgaagtggattacagtggcagttattttacaaggatttgtgacactagtaacatacccgtgtaaccctttgagaactatcagaccagctttcagagtcttaggattgtcggtcttgcgatctgataaattatagaactgggcaatggtaaaaacagtcacaagttcaagaagttcaggtttttaaaacagatatcctataatgtcatataatttttaaatgatttacaagactacataaatgtgtttataacaaacagaaatgatgttacttgccaaaatttttctggcaaataaaaaaggtattttattaagattctcataaatctgaaattttatttgaaaaactgataatagcctaagtcttcttttcttttttttaggcatactgaatttctgttttaaaatccattgcatgaaaattcaatttgccttggtatatgcagttagcattgccattttaaaaatgaattaaaacggtgactctgaagttgcatgaatatcctccagtgcattacctattgcatgtccaccatagttctcaaagggttagtgtggcttctggcatttagccgtccatttgatcactgacagagccaagagaccaccaaagcatttcattgttgagtgtaatttgtcctaacagcagtattgtcattttcatgtgacctgcagagcaggtttgtatcaatatttttttcctagagaaaagtcagcaactgacagacctctttattgatttttaggagctgcttcttgcagtgaaaggctttacagccactgggctgtgaacttattagagatggtcagaatgaatgcaccccatgagtcagacattggctttgtgtgaaagccagctttgaggggattagcttttgaaacaatgaacagcttgccttgaacttgattattgatctattgactgtcattaacaacaacttaaacattgtcttctgtgaaaattttccttgaagagtcctgttctatgtctttgccctttgacctttaacttgcaaactggcacaaactgaaggaaatctggtgttgcttctccattggattagttgttctctaaaacctagtaagcatgagctgtttccttagagtggagagagtggtgatggcagatctgcagatggacactttgctctttacatgcacactctgaaaatgccctataggtagaagtgaattttaatttcattttaatataatttcaagtctaaattcatcattttagtacaaattacaaaaactataggaaaaaaaaaacctcaaatacttgaatggccagtgtggcttttatataaagcaggaattttatactagtaaaaatttcttactcatttgctaatacacatttccagatgatttttaatgagtgtaggtatacattcttatttggaaatggatagtttggctgccttgaatttatatttatactcaacgtagcatgaaaattagaatgccttttggttaaactacatgtttatgatttggttggggaaaatattttataattgtgggtggcatgctgcaaagccttgcagattgttatttcttacaacctgagcgtatatagtatgagcctaagaaaaaagaagagtaagaaaagaagaatggctttacagtaaaatatcatacaatgcagacaatattttaagaggatattggagattatgtacgcaagggccaagaaagcaagaaatgagaaccagagtcagccctgtagctttacttcagtgcttccattctagatgatgctgatattataaagagttagtcactgctgctaagcatggaggactatatacataagctcgtttatacagtgtttgcttgtgggagggtttaatccttttagggccttgatgtcaagaaaaaaataactggaaactatattttgctaaagatagaaatgaggaactgtgtcattttgggacatgtgcaaatcattgaggaactccatcaccctgcattgaaaattgatttttttttcctctaaaatgagaaagaaactgaataagcaatctgttgcctctttactcattcatcacaatatcctgattcgtcataaggctatcagtatataagggctagaaaataatcatagcattaagaaggaaggagtctatcattatgcttgaattctggcaaatgtcatgaataagggttgggtcatatttactttaatatgagacaagatttatgtgataagcaaaggcatataaggctgctcttttgaacagaacatttcagttatcaggctgtactattacaagagataagaagacaataaggacaatgtaatcacaaacagtgggattccatttgtttattgtacaccagctactttgtgggtatggttcctgactcctcttctacatgaggtttgggaaaaaagtctcaaaccaaatggaacagtgaaagggaaagtaattcatctagcacataagaatagtgattcaaaaccaatgcagaataaatttccatgggtcaataacataaggtgtcagttcagtgttactagagatatgcaaggcataaaatattttcatcaccccatcactaataacatgaaaagctcagacataggatttcccaaattgaaatgaaaacacattcatgcctgcaaaaataattctccttctgcttcatttctcattactttatctaatataaacacaaatgtaaacaaggtaatggtcttcatgtaaaatgaccatatagttaagaattttagtaaaatattgttgttctgtgtattattaaacaaatgcaatgaagtattaaaatagctgatcagtttgaatttcctgtaaagcagtaattccgcatcagaattgtagataaggttgtgaatttattgactcatttcagaacagtgtctgttgacatggcagtcagagcaggtgaatacagatgctctttctgattgcaaaggttatagagctaaattagacagcattatgtgatactagcaaagacaacttctgttataaatcagagggcaaggcttttctgaatcgatgtgataaattactaagtaatgattaccaaaaataattactaagtaataaaagatacagactggtttactgaaataagcaagtgttacatttaataattacctataatctttttttgttaacacataagcaagtgttacctttaataattacctataatctttttttgttaacacataatttggccatttcatatactgtgtacctattttcattccctctctgtgggtcattaaaaaacacaatgtggtggataaaaaaaaaaaaaa

SEQ ID NO: 55 - protein, 607 aa, Homo sapiens
  Pre-pro-MMP-16
MILLTFSTGRRLDFVHHSGVFFLQTLLWILCATVCGTEQYFNVEVWLQKYGYLPPTDPRMSVLRSAETMQSALAAMQQFYGINMTGKVDRNTIDWMKKPRCGVPDQTRGSSKFHIRRKRYALTGQKWQHKHITYSIKNVTPKVGDPETRKAIRRAFDVWQNVTPLTFEEVPYSELENGKRDVDITIIFASGFHGDSSPFDGEGGFLAHAYFPGPGIGGDTHFDSDEPWTLGNPNHDGNDLFLVAVHELGHALGLEHSNDPTAIMAPFYQYMETDNFKLPNDDLQGIQKIYGPPDKIPPPTRPLPTVPPHRSIPPADPRKNDRPKPPRPPTGRPSYPGAKPNICDGNFNTLAILRREMFVFKDQWFWRVRNNRVMDGYPMQITYFWRGLPPSIDAVYENSDGNFVFFKGNKYWVFKDTTLQPGYPHDLITLGSGIPPHGIDSAIWWEDVGKTYFFKGDRYWRYSEEMKTMDPGYPKPITVWKGIPESPQGAFVHKENGFTYFYKGKEYWKFNNQILKVEPGYPRSILKDFMGCDGPTDRVKEGHSPPDDVDIVIKLDNTASTVKAIAIVIPCILALCLLVLVYTVFQFKRKGTPRHILYCKRSMQEWV

SEQ ID NO: 56 - protein, 576 aa, Homo sapiens
  Pro-MMP-16
ATVCGTEQYFNVEVWLQKYGYLPPTDPRMSVLRSAETMQSALAAMQQFYGINMTGKVDRNTIDWMKKPRCGVPDQTRGSSKFHIRRKRYALTGQKWQHKHITYSIKNVTPKVGDPETRKAIRRAFDVWQNVTPLTFEEVPYSELENGKRDVDITIIFASGFHGDSSPFDGEGGFLAHAYFPGPGIGGDTHFDSDEPWTLGNPNHDGNDLFLVAVHELGHALGLEHSNDPTAIMAPFYQYMETDNFKLPNDDLQGIQKIYGPPDKIPPPTRPLPTVPPHRSIPPADPRKNDRPKPPRPPTGRPSYPGAKPNICDGNFNTLAILRREMFVFKDQWFWRVRNNRVMDGYPMQITYFWRGLPPSIDAVYENSDGNFVFFKGNKYWVFKDTTLQPGYPHDLITLGSGIPPHGIDSAIWWEDVGKTYFFKGDRYWRYSEEMKTMDPGYPKPITVWKGIPESPQGAFVHKENGFTYFYKGKEYWKFNNQILKVEPGYPRSILKDFMGCDGPTDRVKEGHSPPDDVDIVIKLDNTASTVKAIAIVIPCILALCLLVLVYTVFQFKRKGTPRHILYCKRSMQEWV

SEQ ID NO: 57 - DNA, 2429 bp, Homo sapiens
  MMP-17
  CDS (100)...(1911): Pre-pro-MMP-17 coding sequence
  ref <308>: DATABASE ACCESSION NUMBER: NCBI: NM_016155.4
  ref <309>: DATABASE ENTRY DATE: 2012-10-21
ccggcgggggcgccgcggagagcggagggcgccgggctgcggaacgcgaagcggagggcgcgggaccctgcacgccgcccgcgggcccatgtgagcgccatgcggcgccgcgcagcccggggacccggcccgccgcccccagggcccggactctcgcggctgccgctgccgctgctgctgctgctggcgctggggacccgcgggggctgcgccgcgcccgcacccgcgccgcgcgccgaggacctcagcctgggagtggagtggctaagcaggttcggttacctgcccccggctgaccccacaacagggcagctgcagacgcaagaggagctgtctaaggccatcacagccatgcagcagtttggtggcctggaggccaccggcatcctggacgaggccaccctggccctgatgaaaaccccacgctgctccctgccagacctccctgtcctgacccaggctcgcaggagacgccaggctccagcccccaccaagtggaacaagaggaacctgtcgtggagggtccggacgttcccacgggactcaccactggggcacgacacggtgcgtgcactcatgtactacgccctcaaggtctggagcgacattgcgcccctgaacttccacgaggtggcgggcagcgccgccgacatccagatcgacttctccaaggccgaccataacgacggctaccccttcgacggccccggcggcaccgtggcccacgccttcttccccggccaccaccacaccgccggggacacccactttgacgatgacgaggcctggaccttccgctcctcggatgcccacgggatggacctgtttgcagtggctgtccacgagtttggccacgccattgggttaagccatgtggccgctgcacactccatcatgcggccgtactaccagggcccggtgggtgacccgctgcgctacgggctcccctacgaggacaaggtgcgcgtctggcagctgtacggtgtgcgggagtctgtgtctcccacggcgcagcccgaggagcctcccctgctgccggagcccccagacaaccggtccagcgccccgcccaggaaggacgtgccccacagatgcagcactcactttgacgcggtggcccagatccggggtgaagctttcttcttcaaaggcaagtacttctggcggctgacgcgggaccggcacctggtgtccctgcagccggcacagatgcaccgcttctggcggggcctgccgctgcacctggacagcgtggacgccgtgtacgagcgcaccagcgaccacaagatcgtcttctttaaaggagacaggtactgggtgttcaaggacaataacgtagaggaaggatacccgcgccccgtctccgacttcagcctcccgcctggcggcatcgacgctgccttctcctgggcccacaatgacaggacttatttctttaaggaccagctgtactggcgctacgatgaccacacgaggcacatggaccccggctaccccgcccagagccccctgtggaggggtgtccccagcacgctggacgacgccatgcgctggtccgacggtgcctcctacttcttccgtggccaggagtactggaaagtgctggatggcgagctggaggtggcacccgggtacccacagtccacggcccgggactggctggtgtgtggagactcacaggccgatggatctgtggctgcgggcgtggacgcggcagaggggccccgcgcccctccaggacaacatgaccagagccgctcggaggacggttacgaggtctgctcatgcacctctggggcatcctctcccccgggggccccaggcccactggtggctgccaccatgctgctgctgctgccgccactgtcaccaggcgccctgtggacagcggcccaggccctgacgctatgacacacagcgcgagcccatgagaggacagaggcggtgggacagcctggccacagagggcaaggactgtgccggagtccctgggggaggtgctggcgcgggatgaggacgggccaccctggcaccggaaggccagcagagggcactgcccgccagggctgggcaggctcaggtggcaaggacggagctgtcccctagtgagggactgtgttgactgacgagccgaggggtggccgctccagaagggtgcccagtcaggccgcaccgccgccagcctcctccggccctggagggagcatctcgggctgggggcccacccctctctgtgccggcgccaccaaccccacccacactgctgcctggtgctcccgccggcccacagggcctccgtccccaggtccccagtggggcagccctccccacagacgagccccccacatggtgccgcggcacgtcccccctgtgacgcgttccagaccaacatgacctctccctgctttgtaaaaaaaaaaaaaaaaaaa

SEQ ID NO: 58 - protein, 603 aa, Homo sapiens
  Pre-pro-MMP-17
MRRRAARGPGPPPPGPGLSRLPLPLLLLLALGTRGGCAAPAPAPRAEDLSLGVEWLSRFGYLPPADPTTGQLQTQEELSKAITAMQQFGGLEATGILDEATLALMKTPRCSLPDLPVLTQARRRRQAPAPTKWNKRNLSWRVRTFPRDSPLGHDTVRALMYYALKVWSDIAPLNFHEVAGSAADIQIDFSKADHNDGYPFDGPGGTVAHAFFPGHHHTAGDTHFDDDEAWTFRSSDAHGMDLFAVAVHEFGHAIGLSHVAAAHSIMRPYYQGPVGDPLRYGLPYEDKVRVWQLYGVRESVSPTAQPEEPPLLPEPPDNRSSAPPRKDVPHRCSTHFDAVAQIRGEAFFFKGKYFWRLTRDRHLVSLQPAQMHRFWRGLPLHLDSVDAVYERTSDHKIVFFKGDRYWVFKDNNVEEGYPRPVSDFSLPPGGIDAAFSWAHNDRTYFFKDQLYWRYDDHTRHMDPGYPAQSPLWRGVPSTLDDAMRWSDGASYFFRGQEYWKVLDGELEVAPGYPQSTARDWLVCGDSQADGSVAAGVDAAEGPRAPPGQHDQSRSEDGYEVCSCTSGASSPPGAPGPLVAATMLLLLPPLSPGALWTAAQALTL

SEQ ID NO: 59 - protein, 568 aa, Homo sapiens
  Pro-MMP-17
GCAAPAPAPRAEDLSLGVEWLSRFGYLPPADPTTGQLQTQEELSKAITAMQQFGGLEATGILDEATLALMKTPRCSLPDLPVLTQARRRRQAPAPTKWNKRNLSWRVRTFPRDSPLGHDTVRALMYYALKVWSDIAPLNFHEVAGSAADIQIDFSKADHNDGYPFDGPGGTVAHAFFPGHHHTAGDTHFDDDEAWTFRSSDAHGMDLFAVAVHEFGHAIGLSHVAAAHSIMRPYYQGPVGDPLRYGLPYEDKVRVWQLYGVRESVSPTAQPEEPPLLPEPPDNRSSAPPRKDVPHRCSTHFDAVAQIRGEAFFFKGKYFWRLTRDRHLVSLQPAQMHRFWRGLPLHLDSVDAVYERTSDHKIVFFKGDRYWVFKDNNVEEGYPRPVSDFSLPPGGIDAAFSWAHNDRTYFFKDQLYWRYDDHTRHMDPGYPAQSPLWRGVPSTLDDAMRWSDGASYFFRGQEYWKVLDGELEVAPGYPQSTARDWLVCGDSQADGSVAAGVDAAEGPRAPPGQHDQSRSEDGYEVCSCTSGASSPPGAPGPLVAATMLLLLPPLSPGALWTAAQALTL

SEQ ID NO: 60 - DNA, 4344 bp, Homo sapiens
  MMP-24
  CDS (4)...(1941): Pre-pro-MMP-24
gggatgccgaggagccggggcggccgcgccgcgccggggccgccgccgccgccgccgccgccgggccaggccccgcgctggagccgctggcgggtccctgggcggctgctgctgctgctgctgcccgcgctctgctgcctcccgggcgccgcgcgggcggcggcggcggcggcgggggcagggaaccgggcagcggtggcggtggcggtggcgcgggcggacgaggcggaggcgcccttcgccgggcagaactggttaaagtcctatggctatctgcttccctatgactcacgggcatctgcgctgcactcagcgaaggccttgcagtcggcagtctccactatgcagcagttttacgggatcccggtcaccggtgtgttggatcagacaacgatcgagtggatgaagaaaccccgatgtggtgtccctgatcacccccacttaagccgtaggcggagaaacaagcgctatgccctgactggacagaagtggaggcaaaaacacatcacctacagcattcacaactataccccaaaagtgggtgagctagacacgcggaaagctattcgccaggctttcgatgtgtggcagaaggtgaccccactgacctttgaagaggtgccataccatgagatcaaaagtgaccggaaggaggcagacatcatgatcttttttgcttctggtttccatggcgacagctccccatttgatggagaagggggattcctggcccatgcctacttccctggcccagggattggaggagacacccactttgactccgatgagccatggacgctaggaaatgccaaccatgacgggaacgacctcttcctggtggctgtgcatgagctgggccacgcgctgggactggagcactccagcgaccccagcgccatcatggcgcccttctaccagtacatggagacgcacaacttcaagctgccccaggacgatctccagggcatccagaagatctatggacccccagccgagcctctggagcccacaaggccactccctacactccccgtccgcaggatccactcaccatcggagaggaaacacgagcgccagcccaggccccctcggccgcccctcggggaccggccatccacaccaggcaccaaacccaacatctgtgacggcaacttcaacacagtggccctcttccggggcgagatgtttgtctttaaggatcgctggttctggcgtctgcgcaataaccgagtgcaggagggctaccccatgcagatcgagcagttctggaagggcctgcctgcccgcatcgacgcagcctatgaaagggccgatgggagatttgtcttcttcaaaggtgacaagtattgggtgtttaaggaggtgacggtggagcctgggtacccccacagcctgggggagctgggcagctgtttgccccgtgaaggcattgacacagctctgcgctgggaacctgtgggcaagacctactttttcaaaggcgagcggtactggcgctacagcgaggagcggcgggccacggaccctggctaccctaagcccatcaccgtgtggaagggcatcccacaggctccccaaggagccttcatcagcaaggaaggatattacacctatttctacaagggccgggactactggaagtttgacaaccagaaactgagcgtggagccaggctacccgcgcaacatcctgcgtgactggatgggctgcaaccagaaggaggtggagcggcggaaggagcggcggctgccccaggacgacgtggacatcatggtgaccatcaacgatgtgccgggctccgtgaacgccgtggccgtggtcatcccctgcatcctgtccctctgcatcctggtgctggtctacaccatcttccagttcaagaacaagacaggccctcagcctgtcacctactataagcggccagtccaggaatgggtgtgagcagcccagagccctctctatccacttggtctggccagccaggcccttcctcaccagggtctgaggggcagctctggccagtgctcaccagggccagcagggccctaggctggggtcgtacagctgaagtggtgggtgcattggcctaggctgagcgtggggcagggaattatgggggctgtgccccagggtgggtgtctggcacccagctgccagccttctgtcctgggcaaactactccctacttaagggaataggccaggctccatccggaggcagggaccatgccaggaggagcccctgtggtcacggcatcctgtggtgtccatgaggtaccacagctccactcctggctggaacccagcaccctctgtgggaagccagcactagctctcatcccccatccgggagataccaccagtcctggtccccttttgccaacacctgctggtcagatgtccccctacccccaccccactgtcctccaaggctacaggacccctgcttctgacacagtgagcaacaagcctgggtttccctgctggcagacggcagatccctcaggaaacctgctccacttgtcagggtctcttcggagacccaggatttagggtcacatgctgcaggcagggctgtggcccagctgggtctgacaaggacccagctgtcacatcgtgaatatttaaatgtcctgtcactactgtcccattttgcaaaggctgcttgaggctttaggtgaactagaggtgactgtcttggtgatgaggccagcatagcggccctcccccaggcgacaaggaccaaggtgctgctaaggccactctagcgcccagacaccccagtagctgagctctgctcctatggctacagagctggggcagaagctgaccccatttctggaggaagatccgagtttgtgaccgtcctccactcccctctattgtcactgtccccagctttgctccagtctgtcacttgcagcctggagctcagcctcaccagttaggtgaggcagagatggctgcagggccaacactggcagagcctgggagtccttcggaaggggaccagggcgtctgaagtgctcagtgcccccactactctgaggccgactccagctactctgaggccgactcaatctctcggctggaagcagtgttttcccagagcttggcccttgctgacctcgctcactgggcccatcttcccacactgctcttagaaggacacccctaccggtagcagccccaagctgagggggctccctttttgaccttcactggcccgcccttcactgtctccagcaggagttcctagggcttggcctgccttgctccacagtacggcggaggcagccctgcttgtcactgaggagccctagacaaggccaatgggttcatcaatgcccactggctctctgccaaagccaaaaaggtgtcaggcagtctccagcgtgctggccgggtctcggatgccacccctgctcactgagcctgcatgggccttgcccccgaccctgtggtctctgggattggggtcggcttaccctgtagcacagacagggactcctgctgccctgggagctgtctcaagcaaaatctcttgtcccagaggtgcccatgtgggtccgctgtgtcccctgtcatcatccttgttttttctcattttggccaagggcaggctccctgggacaggcagggaacaactgcggagatattagtgattcataggtttgtacagtgttttatactttgcaaagcactttattagctcacacctgtccactcacatgaaactcgtgttaggccctgggaggccgacggtaactctcaccgtgccctcagatgaagcacagagaggttgttacttgcccgggccatccagtgggctggctgggtcttgtgtccccatctgtggacccctctagggtctgagatgagatgagaagtgtctcctgtatccacctcttcctggcctcccttcccccacttcctggtccctgtccactcctcaggttggtgctctcacttcttgaaagctctaggcacccccgcctcccgccaggctccccattggctcctggcaggccagctgagaatgaacaggagatggaggcaggcagcccaggctgcagaggtgagggatgtggggccaggcccagagggctcagcctagaggcttccaatctcagattctcctgcctgtggtcatctgtttgtccatcaccccaggacagggcagacagaggggcaaagcactgggggccccagagcctagcttcccctcagcctgggggacatcacagcatttcagtgtcagtcacattttaaactgatcagcctttgtataatgttttttaaatcatttctaaataaaacagaaatacagagtgaaaaaaaaaaa

SEQ ID NO: 61 - protein, 645 aa, Homo sapiens
  Pre-pro-MMP-24
MPRSRGGRAAPGPPPPPPPPGQAPRWSRWRVPGRLLLLLLPALCCLPGAARAAAAAAGAGNRAAVAVAVARADEAEAPFAGQNWLKSYGYLLPYDSRASALHSAKALQSAVSTMQQFYGIPVTGVLDQTTIEWMKKPRCGVPDHPHLSRRRRNKRYALTGQKWRQKHITYSIHNYTPKVGELDTRKAIRQAFDVWQKVTPLTFEEVPYHEIKSDRKEADIMIFFASGFHGDSSPFDGEGGFLAHAYFPGPGIGGDTHFDSDEPWTLGNANHDGNDLFLVAVHELGHALGLEHSSDPSAIMAPFYQYMETHNFKLPQDDLQGIQKIYGPPAEPLEPTRPLPTLPVRRIHSPSERKHERQPRPPRPPLGDRPSTPGTKPNICDGNFNTVALFRGEMFVFKDRWFWRLRNNRVQEGYPMQIEQFWKGLPARIDAAYERADGRFVFFKGDKYWVFKEVTVEPGYPHSLGELGSCLPREGIDTALRWEPVGKTYFFKGERYWRYSEERRATDPGYPKPITVWKGIPQAPQGAFISKEGYYTYFYKGRDYWKFDNQKLSVEPGYPRNILRDWMGCNQKEVERRKERRLPQDDVDIMVTINDVPGSVNAVAVVIPCILSLCILVLVYTIFQFKNKTGPQPVTYYKRPVQEWV

SEQ ID NO: 62 - protein, 593 aa, Homo sapiens
  Pro-MMP-24
AAAAAGAGNRAAVAVAVARADEAEAPFAGQNWLKSYGYLLPYDSRASALHSAKALQSAVSTMQQFYGIPVTGVLDQTTIEWMKKPRCGVPDHPHLSRRRRNKRYALTGQKWRQKHITYSIHNYTPKVGELDTRKAIRQAFDVWQKVTPLTFEEVPYHEIKSDRKEADIMIFFASGFHGDSSPFDGEGGFLAHAYFPGPGIGGDTHFDSDEPWTLGNANHDGNDLFLVAVHELGHALGLEHSSDPSAIMAPFYQYMETHNFKLPQDDLQGIQKIYGPPAEPLEPTRPLPTLPVRRIHSPSERKHERQPRPPRPPLGDRPSTPGTKPNICDGNFNTVALFRGEMFVFKDRWFWRLRNNRVQEGYPMQIEQFWKGLPARIDAAYERADGRFVFFKGDKYWVFKEVTVEPGYPHSLGELGSCLPREGIDTALRWEPVGKTYFFKGERYWRYSEERRATDPGYPKPITVWKGIPQAPQGAFISKEGYYTYFYKGRDYWKFDNQKLSVEPGYPRNILRDWMGCNQKEVERRKERRLPQDDVDIMVTINDVPGSVNAVAVVIPCILSLCILVLVYTIFQFKNKTGPQPVTYYKRPVQEWV

SEQ ID NO: 63 - DNA, 3565 bp, Homo sapiens
  MMP-25
  CDS (238)...(1926): Pre-pro-MMP-25 coding sequence
gattcccgggcccacccgacccagcggcgcgaccctggccctccgggaccctccgctgactccaccgcgcacttcccgggacccccacacacatcccagccctccggccgatccctccctactcggtgccgggtgccccccgccctctccaggcccggatctcctcccccaggtccccggggcggccccagccaggcccccttcgaaccccgccggcggcccgggctggggcgcaccatgcggctgcggctccggcttctggcgctgctgcttctgctgctggcaccgcccgcgcgcgccccgaagccctcggcgcaggacgtgagcctgggcgtggactggctgactcgctatggttacctgccgccaccccaccctgcccaggcccagctgcagagccctgagaagttgcgcgatgccatcaaagtcatgcagaggttcgcggggctgccggagaccggccgcatggacccagggacagtggccaccatgcgtaagccccgctgctccctgcctgacgtgctgggggtggcggggctggtcaggcggcgtcgccggtacgctctgagcggcagcgtgtggaagaagcgaaccctgacatggagggtacgttccttcccccagagctcccagctgagccaggagaccgtgcgggtcctcatgagctatgccctgatggcctggggcatggagtcaggcctcacatttcatgaggtggattccccccagggccaggagcccgacatcctcatcgactttgcccgcgccttccaccaggacagctaccccttcgacgggttggggggcaccctagcccatgccttcttccctggggagcaccccatctccggggacactcactttgacgatgaggagacctggacttttgggtcaaaagacggcgaggggaccgacctgtttgccgtggctgtccatgagtttggccacgccctgggcctgggccactcctcagcccccaactccattatgaggcccttctaccagggtccggtgggcgaccctgacaagtaccgcctgtctcaggatgaccgcgatggcctgcagcaactctatgggaaggcgccccaaaccccatatgacaagcccacaaggaaacccctggctcctccgccccagcccccggcctcgcccacacacagcccatccttccccatccctgatcgatgtgagggcaattttgacgccatcgccaacatccgaggggaaactttcttcttcaaaggcccctggttctggcgcctccagccctccggacagctggtgtccccgcgacccgcacggctgcaccgcttctgggaggggctgcccgcccaggtgagggtggtgcaggccgcctatgctcggcaccgagacggccgaatcctcctctttagcgggccccagttctgggtgttccaggaccggcagctggagggcggggcgcggccgctcacggagctggggctgcccccgggagaggaggtggacgccgtgttctcgtggccacagaacgggaagacctacctggtccgcggccggcagtactggcgctacgacgaggcggcggcgcgcccggaccccggctaccctcgcgacctgagcctctgggaaggcgcgcccccctcccctgacgatgtcaccgtcagcaacgcaggtgacacctacttcttcaagggcgcccactactggcgcttccccaagaacagcatcaagaccgagccggacgccccccagcccatggggcccaactggctggactgccccgccccgagctctggtccccgcgcccccaggccccccaaagcgacccccgtgtccgaaacctgcgattgtcagtgcgagctcaaccaggccgcaggacgttggcctgctcccatcccgctgctcctcttgcccctgctggtggggggtgtagcctcccgctgatggggggagccatccagaccgaacagcgccctccacggccgagtcccccgccgctggacctggtcgggggttgtgaggcgctgcggaggccccttgtctgttcccacggacgggggctcgggcgcggactaagcaggggggatctcccgcgcaggggcggcggcggcggggaccggtcgcctggcgctgggctcagtctcctcagggtctgagaccccggcgctgccaccggaacccgccttcaggggcgcacgcgcgctgggaccatgcgtcggtcgtcgcccccgtcgttccctcccggctgccgccagggggcggtcggaccccgcctcccgagcccggggaggggcggggaggacaaggggcgggcccgcggcctcacccggagggacggcagccccggtcgcgcgctggccccgcaggaccttccttttccaggaagagccagcttttctcggagcgcagtcctgggactctccgcagccccgccccgcctggccactgcgtctggcattcctgggtcgttagaggacaggcctgactgcgaagctgtgccttgcccctctcccacccgcagtttctcaccccgttctgctcccacaaggcccccctacagtcactgccacactggtggggacctgggacccagacccggaaccagcccagatatcacccctgaggacccatgcgccacgtcctgggtggtggaatcagtggctggagggacgacccttgctctccaggctgttaaccttttccgttgctcccccgccacccacctcctcctccccaggccacccaacttgggcacctccctgggcccagaactgccttccattcaatggggaacccttctatccccaagaaccccttccctgcttgcaccctggagagaacagcttgactcccatcaactcaacgctggtggaaagacagggaccgaaccctggctcaggcctggtcattgcctcctcagcactccctcctgggaggccttagctctagagtgaggggtgggtggaacctgggggcacctcgttcaccctgtccccactccccacagttttaggatctaaatgattgcctctggaactattcttctagactatcccacatcagaatcactgggaaatttaagtttgcagatcccacactcaccctgaatcctcactcagggtggggtcaggaatctgcattttaactagtcgcggggattgtggggggcagtagctggctgtttcgtggcatttctgtggctctgcagtgttcctccaccccaggaccaatatgttcaggccacaccgatggcctgaaccccatgggtagagtcacttaggggccacttcctaagttgctgtccagcctcagtgaccccctagtgcttcctggagctgaggctgtgggcggctgtcccagcaaccatgcgaggggttgccccagttgctcatacaaacagatcagcatgaggacagaaggcaggagactttggtcagttacctgggaattctgggctgccaggaaacgatttgggcctctgtcagtttcttttccatgtatgaggagggggaaatttgtatattagaaacttattcatcccactcaggacaataaaaacgaatgtacaaaaaaaaaaaaaaaa

SEQ ID NO: 64 - protein, 562 aa, Homo sapiens
  Pre-pro-MMP-25
MRLRLRLLALLLLLLAPPARAPKPSAQDVSLGVDWLTRYGYLPPPHPAQAQLQSPEKLRDAIKVMQRFAGLPETGRMDPGTVATMRKPRCSLPDVLGVAGLVRRRRRYALSGSVWKKRTLTWRVRSFPQSSQLSQETVRVLMSYALMAWGMESGLTFHEVDSPQGQEPDILIDFARAFHQDSYPFDGLGGTLAHAFFPGEHPISGDTHFDDEETWTFGSKDGEGTDLFAVAVHEFGHALGLGHSSAPNSIMRPFYQGPVGDPDKYRLSQDDRDGLQQLYGKAPQTPYDKPTRKPLAPPPQPPASPTHSPSFPIPDRCEGNFDAIANIRGETFFFKGPWFWRLQPSGQLVSPRPARLHRFWEGLPAQVRVVQAAYARHRDGRILLFSGPQFWVFQDRQLEGGARPLTELGLPPGEEVDAVFSWPQNGKTYLVRGRQYWRYDEAAARPDPGYPRDLSLWEGAPPSPDDVTVSNAGDTYFFKGAHYWRFPKNSIKTEPDAPQPMGPNWLDCPAPSSGPRAPRPPKATPVSETCDCQCELNQAAGRWPAPIPLLLLPLLVGGVASR

SEQ ID NO: 65 - protein, 541 aa, Homo sapiens
  Pro-MMP-25
PKPSAQDVSLGVDWLTRYGYLPPPHPAQAQLQSPEKLRDAIKVMQRFAGLPETGRMDPGTVATMRKPRCSLPDVLGVAGLVRRRRRYALSGSVWKKRTLTWRVRSFPQSSQLSQETVRVLMSYALMAWGMESGLTFHEVDSPQGQEPDILIDFARAFHQDSYPFDGLGGTLAHAFFPGEHPISGDTHFDDEETWTFGSKDGEGTDLFAVAVHEFGHALGLGHSSAPNSIMRPFYQGPVGDPDKYRLSQDDRDGLQQLYGKAPQTPYDKPTRKPLAPPPQPPASPTHSPSFPIPDRCEGNFDAIANIRGETFFFKGPWFWRLQPSGQLVSPRPARLHRFWEGLPAQVRVVQAAYARHRDGRILLFSGPQFWVFQDRQLEGGARPLTELGLPPGEEVDAVFSWPQNGKTYLVRGRQYWRYDEAAARPDPGYPRDLSLWEGAPPSPDDVTVSNAGDTYFFKGAHYWRFPKNSIKTEPDAPQPMGPNWLDCPAPSSGPRAPRPPKATPVSETCDCQCELNQAAGRWPAPIPLLLLPLLVGGVASR

SEQ ID NO: 66 - DNA, 1674 bp, Homo sapiens
  MMP-20
  CDS (14)...(1465): Pre-pro-MMP-20 codind sequence
ctactgtgaggggatgaaggtgctccctgcatctggccttgctgtcttcctcatcatggctttgaagttttccactgcagccccctccctagttgcagcctcccccaggacctggaggaacaactaccgcctcgcacaggcgtatcttgacaaatattacacaaataaagaaggacaccagattggtgagatggttgcaagaggaagcaattccatgataaggaagattaaggagctacaagcgttctttggcctccaagtcaccgggaagttagaccagaccacaatgaacgtgatcaagaagcctcgctgtggagttcctgatgtggccaattatcgcctcttccctggtgaacccaaatggaaaaaaaatactttgacatacagaatatctaaatacacaccttccatgagttctgtcgaggtggacaaagcagtggagatggccttgcaggcctggagtagcgccgtccctctgagctttgtcagaataaactcaggagaagcggatattatgatatcttttgaaaatggagatcacggggattcctatccattcgatgggcctcgggggactctagcccatgcatttgctcctggagaaggcctgggaggagatacacatttcgacaatcctgagaagtggactatgggaacgaatggttttaatttgtttaccgttgctgctcatgaatttggccatgccctgggcctggcccattccacagacccatcagcactgatgtacccaacttataagtacaagaatccctatggattccacctccccaaagatgatgtgaaagggatccaggcattatacggacctcggaaagtattcctggggaagcccactctgccccatgccccccatcacaagccatccatccctgacctctgtgactccagctcatcctttgacgctgtgacaatgctggggaaggagctcctgctcttcaaggaccggattttctggagacggcaggttcacttgcggacaggaattcggcccagcactattaccagctccttcccccagctcatgtccaatgtggatgcagcttacgaagtggctgagaggggcactgcttacttcttcaaaggtccccactactggataacaagaggattccaaatgcaaggtcctcctcggactatttatgactttggatttccaaggcacgtgcagcaaatagatgctgctgtctacctcagggagccacagaagacccttttctttgtgggagatgaatactacagctacgacgaaaggaaaaggaaaatggaaaaagactatccaaagaatactgaagaagaattttcaggagtaaatggccaaatcgatgctgctgtagaattaaatggctacatttacttcttttcaggaccaaaaacatacaagtatgacacagagaaggaagatgtggttagtgtggtgaaatctagttcctggattggttgctaaatagaaaagcctagtcttctcaagcaatgaggatgactacaagcagcctctaactggatcttaaggactaaagcagaatgtaggagagggattcttccaaaggccttcaaatcaaattagaattcactgagaataataatacttccaatttttttcatagttgtataatcagaatttcaatccacattagaaaagtttttatatgggca

SEQ ID NO: 67 - protein, 483 aa, Homo sapiens [sequence omitted]

SEQ ID NO: 68 - protein, 461 aa, Homo sapiens
  Pro-MMP-20
APSLVAASPRTWRNNYRLAQAYLDKYYTNKEGHQIGEMVARGSNSMIRKIKELQAFFGLQVTGKLDQTTMNVIKKPRCGVPDVANYRLFPGEPKWKKNTLTYRISKYTPSMSSVEVDKAVEMALQAWSSAVPLSFVRINSGEADIMISFENGDHGDSYPFDGPRGTLAHAFAPGEGLGGDTHFDNPEKWTMGTNGFNLFTVAAHEFGHALGLAHSTDPSALMYPTYKYKNPYGFHLPKDDVKGIQALYGPRKVFLGKPTLPHAPHHKPSIPDLCDSSSSFDAVTMLGKELLLFKDRIFWRRQVHLRTGIRPSTITSSFPQLMSNVDAAYEVAERGTAYFFKGPHYWITRGFQMQGPPRTIYDFGFPRHVQQIDAAVYLREPQKTLFFVGDEYYSYDERKRKMEKDYPKNTEEEFSGVNGQIDAAVELNGYIYFFSGPKTYKYDTEKEDVVSVVKSSSWIGC

SEQ ID NO: 69 - DNA, 3262 bp, Homo sapiens
  MMP-19
  CDS (122)...(1648): Pre-pro-MMP-19 coding sequence
ggctggagagtaaaaagaactgggggtaagagcccctctgcctagcactgctcccccaaggctcccagaaatctcaggtcagaggcacggacagcctctggagctctcgtctggtgggaccatgaactgccagcagctgtggctgggcttcctactccccatgacagtctcaggccgggtcctggggcttgcagaggtggcgcccgtggactacctgtcacaatatgggtacctacagaagcctctagaaggatctaataacttcaagccagaagatatcaccgaggctctgagagcttttcaggaagcatctgaacttccagtctcaggtcagctggatgatgccacaagggcccgcatgaggcagcctcgttgtggcctagaggatcccttcaaccagaagacccttaaatacctgttgctgggccgctggagaaagaagcacctgactttccgcatcttgaacctgccctccacccttccaccccacacagcccgggcagccctgcgtcaagccttccaggactggagcaatgtggctcccttgaccttccaagaggtgcaggctggtgcggctgacatccgcctctccttccatggccgccaaagctcgtactgttccaatacttttgatgggcctgggagagtcctggcccatgccgacatcccagagctgggcagtgtgcacttcgacgaagacgagttctggactgaggggacctaccgtggggtgaacctgcgcatcattgcagcccatgaagtgggccatgctctggggcttgggcactcccgatattcccaggccctcatggccccagtctacgagggctaccggccccactttaagctgcacccagatgatgtggcagggatccaggctctctatggcaagaagagtccagtgataagggatgaggaagaagaagagacagagctgcccactgtgcccccagtgcccacagaacccagtcccatgccagacccttgcagtagtgaactggatgccatgatgctggggccccgtgggaagacctatgctttcaagggggactatgtgtggactgtatcagattcaggaccgggccccttgttccgagtgtctgccctttgggaggggctccccggaaacctggatgctgctgtctactcgcctcgaacacaatggattcacttctttaagggagacaaggtgtggcgctacattaatttcaagatgtctcctggcttccccaagaagctgaatagggtagaacctaacctggatgcagctctctattggcctctcaaccaaaaggtgttcctctttaagggctccgggtactggcagtgggacgagctagcccgaactgacttcagcagctaccccaaaccaatcaagggtttgtttacgggagtgccaaaccagccctcggctgctatgagttggcaagatggccgagtctacttcttcaagggcaaagtctactggcgcctcaaccagcagcttcgagtagagaaaggctatcccagaaatatttcccacaactggatgcactgtcgtccccggactatagacactaccccatcaggtgggaataccactccctcaggtacgggcataaccttggataccactctctcagccacagaaaccacgtttgaatactgactgctcacccacagacacaatcttggacattaacccctgaggctccaccacccaccctttcatttcccccccagaagcctaaggcctaatagctgaatgaaatacctgtctgctcagtagaaccttgcaggtgctgtagcaggcgcaagaccgtagatctcaggcctctaacacttccaactccagccaccactttcctgtgcattttcactcctgagaagtgctcccctaactcagatcccctaacttagatttggcccccaactccatttcctgtctgtcttagacagcccttccaactgtgtcatctcttctctggaggtcaatggtggagggagatgcctgggtcctgttcttcctacataaaatgcaagaaaacagcatggccagtaaactgagcaagggccttggaatccttgagaatcacatttatgtgcttatgattacgggcaagctaattaaccttgttgaatctcagattccccatttgcaacattaggttaagaccagtactgcaggattgttgcactaaatgaaatactgtatgtgaagtgcctggcacagtgtctggtacatttgtgtttaataaaagctaactccatgttcataagagaggactgaacagctcttcctctagctgtctggctgtataactcttacagtagtctgtataataagggcatctctattagatctttaggggacagaggatttgtcaagatggttagctctttgttttggggtgcagagaaagaaaagagcagcaacagcagaggctggactccctggttcagtatttaatgccattttattcacatgctcccatgttctccctccctcccattgtagccttgctgcccaggggagggatatgtcttcctttatgcatctgggaaaccaggaacagaccctgcgcaggagagtcagagggggaagagttagaatgggtcagtggctggaacaaagttctggttaaggaggaaattagtgccacccacggtgagaagcagagaaggcacttgcatcctatgcagccctgaagaccaggctcctttgggcaaaaggcaagactctggcaggtgggtcaatgctctctccttggagcaagaagccagcttttggggaaggcaggtcctgaggcaggcactgccctgtggtcttccccaggttgaggagagaagtggaagccccatggaagacagtgctcccagctgaggtaggaggcggaggtgggggtgggggtagtttaagcctatggggcccagggggaaaggccaaacagaaacccaactaccccctaatgaagggcctggaggttggggtatcttggagctcctcagagcccttcttcccatcaaaaaggtatcaaatgccttggaagctccctgatcctacaaaacaaaaaaatgcttatttttaccactgtgaggcaagctgaggtgaacatttaaaaggctatttcaagacgaggtgcggtggctataatcctagcactttgggaggctgaagcaggaggatcacttgagcccaggagttcaagaccagcttgggcaacatagggagaccctgtctctgcaaaaaaataaaaacgaatacataaaaattaaaaaaaaa

SEQ ID NO: 70 - protein, 508 aa, Homo sapiens
  Pre-pro-MMP-19
MNCQQLWLGFLLPMTVSGRVLGLAEVAPVDYLSQYGYLQKPLEGSNNFKPEDITEALRAFQEASELPVSGQLDDATRARMRQPRCGLEDPFNQKTLKYLLLGRWRKKHLTFRILNLPSTLPPHTARAALRQAFQDWSNVAPLTFQEVQAGAADIRLSFHGRQSSYCSNTFDGPGRVLAHADIPELGSVHFDEDEFWTEGTYRGVNLRIIAAHEVGHALGLGHSRYSQALMAPVYEGYRPHFKLHPDDVAGIQALYGKKSPVIRDEEEEETELPTVPPVPTEPSPMPDPCSSELDAMMLGPRGKTYAFKGDYVWTVSDSGPGPLFRVSALWEGLPGNLDAAVYSPRTQWIHFFKGDKVWRYINFKMSPGFPKKLNRVEPNLDAALYWPLNQKVFLFKGSGYWQWDELARTDFSSYPKPIKGLFTGVPNQPSAAMSWQDGRVYFFKGKVYWRLNQQLRVEKGYPRNISHNWMHCRPRTIDTTPSGGNTTPSGTGITLDTTLSATETTFEY

SEQ ID NO: 71 - protein, 490 aa, Homo sapiens
  Pro-MMP-19
RVLGLAEVAPVDYLSQYGYLQKPLEGSNNFKPEDITEALRAFQEASELPVSGQLDDATRARMRQPRCGLEDPFNQKTLKYLLLGRWRKKHLTFRILNLPSTLPPHTARAALRQAFQDWSNVAPLTFQEVQAGAADIRLSFHGRQSSYCSNTFDGPGRVLAHADIPELGSVHFDEDEFWTEGTYRGVNLRIIAAHEVGHALGLGHSRYSQALMAPVYEGYRPHFKLHPDDVAGIQALYGKKSPVIRDEEEEETELPTVPPVPTEPSPMPDPCSSELDAMMLGPRGKTYAFKGDYVWTVSDSGPGPLFRVSALWEGLPGNLDAAVYSPRTQWIHFFKGDKVWRYINFKMSPGFPKKLNRVEPNLDAALYWPLNQKVFLFKGSGYWQWDELARTDFSSYPKPIKGLFTGVPNQPSAAMSWQDGRVYFFKGKVYWRLNQQLRVEKGYPRNISHNWMHCRPRTIDTTPSGGNTTPSGTGITLDTTLSATETTFEY

SEQ ID NO: 72 - DNA, 1919 bp, Homo sapiens
  MMP-21
  CDS (1)...(1710): Pre-pro-MMP-21 coding sequence
atgctcgccgcctccatcttccgtccgacactgctgctctgctggctggctgctccctggcccacccagcccgagagtctcttccacagccgggaccgctcggacctggagccgtccccactgcgccaggccaagcccattgccgacctccacgctgctcagcggttcctgtccagatacggctggtcaggggtgtgggcggcctgggggcccagtcccgaggggccgccggagacccccaagggcgccgccctggccgaggcggtgcgcaggttccagcgggcgaacgcgctgccggccagcggggagctggacgcggccaccctagcggccatgaaccggccgcgctgcggggtcccggacatgcgcccaccgcccccctccgccccgccttcgcccccgggcccgccccccagagcccgctccaggcgctccccgcgggcgccgctgtccttgtcccggcggggttggcagccccggggctaccccgacggcggagctgcccaggccttctccaagaggacgctgagctggcggctgctgggcgaggccctgagcagccaactgtccgtggccgaccagcggcgcattgtggcgctggccttcaggatgtggagcgaggtgacgccgctggacttccgcgaggacctggccgcccccggggccgcggtcgacatcaagctgggctttgggagaggccggcacctgggctgtccgcgggccttcgatgggagcgggcaggagtttgcacacgcctggcgcctaggtgacattcactttgacgacgacgagcacttcacacctcccaccagtgacacgggcatcagccttctcaaggtggccgtccatgaaattggccatgtcctgggcttgcctcacacctacaggacgggatccataatgcaaccaaattacattccccaggagcctgcctttgagttggactggtcagacaggaaagcaattcaaaagctgtatggctcctgtgagggatcatttgatactgcgtttgactggattcgcaaagagagaaaccaatatggagaggtgatggtgagatttagcacatatttcttccgtaacagctggtactggctttatgaaaatcgaaacaataggacacgctatggggaccctatccaaatcctcactggctggcctggaatcccaacacacaacatagatgcctttgttcacatctggacatggaaaagagatgaacgttatttttttcaaggaaatcaatactggagatatgacagtgacaaggatcaggccctcacagaagatgaacaaggaaaaagctatcccaaattgatttcagaaggatttcctggcatcccaagtcccctagacacggcgttttatgaccgaagacagaagttaatttacttcttcaaggagtcccttgtatttgcatttgatgtcaacagaaatcgagtacttaattcttatccaaagaggattactgaagtttttccagcagtaataccacaaaatcatcctttcagaaatatagattccgcttattactcctatgcatacaactccattttctttttcaaaggcaatgcatactggaaggtagttaatgacaaggacaaacaacagaattcctggcttcctgctaatggcttatttccaaaaaagtttatttcagagaagtggtttgatgtttgtgacgtccatatctccacactgaacatgtaataagaaaaagtaggaaatggagggtcataggacttcgctaaaattctgatactgtttacaaagaaaaccggattttcagtagctgaagaaaatatggcactgtaagttaaaacccaatgggaaaagccttagttgaacttttaaaatacttgatttaaaaacaattgctcaggcaaaacataattcataaactaaaaggtttaaaaaaa

SEQ ID NO: 73 - protein, 569 aa, Homo sapiens
  Pre-pro-MMP-21
MLAASIFRPTLLLCWLAAPWPTQPESLFHSRDRSDLEPSPLRQAKPIADLHAAQRFLSRYGWSGVWAAWGPSPEGPPETPKGAALAEAVRRFQRANALPASGELDAATLAAMNRPRCGVPDMRPPPPSAPPSPPGPPPRARSRRSPRAPLSLSRRGWQPRGYPDGGAAQAFSKRTLSWRLLGEALSSQLSVADQRRIVALAFRMWSEVTPLDFREDLAAPGAAVDIKLGFGRGRHLGCPRAFDGSGQEFAHAWRLGDIHFDDDEHFTPPTSDTGISLLKVAVHEIGHVLGLPHTYRTGSIMQPNYIPQEPAFELDWSDRKAIQKLYGSCEGSFDTAFDWIRKERNQYGEVMVRFSTYFFRNSWYWLYENRNNRTRYGDPIQILTGWPGIPTHNIDAFVHIWTWKRDERYFFQGNQYWRYDSDKDQALTEDEQGKSYPKLISEGFPGIPSPLDTAFYDRRQKLIYFFKESLVFAFDVNRNRVLNSYPKRITEVFPAVIPQNHPFRNIDSAYYSYAYNSIFFFKGNAYWKVVNDKDKQQNSWLPANGLFPKKFISEKWFDVCDVHISTLNM

SEQ ID NO: 74 - protein, 545 aa, Homo sapiens
  Pro-MMP-21
ESLFHSRDRSDLEPSPLRQAKPIADLHAAQRFLSRYGWSGVWAAWGPSPEGPPETPKGAALAEAVRRFQRANALPASGELDAATLAAMNRPRCGVPDMRPPPPSAPPSPPGPPPRARSRRSPRAPLSLSRRGWQPRGYPDGGAAQAFSKRTLSWRLLGEALSSQLSAADQRRIVALAFRMWSEVTPLDFREDLAAPGAAVDIKLGFGRGRHLGCPRAFDGSGQEFAHAWRLGDIHFDDDEHFTPPTSDTGISLLKVAVHEIGHVLGLPHTYRTGSIMQPNYIPQEPAFELDWSDRKAIQKLYGSCEGSFDTAFDWIRKERNQYGEVMVRFSTYFFRNSWYWLYENRNNRTRYGDPIQILTGWPGIPTHNIDAFVHIWTWKRDERYFFQGNQYWRYDSDKDQALTEDEQGKSYPKLISEGFPGIPSPLDTAFYDRRQKLIYFFKESLVFAFDVNRNRVLNSYPKRITEVFPAVIPQNHPFRNIDSAYYSYAYNSIFFFKGNAYWKVVNDKDKQQNSWLPANGLFPKKFISEKWFDVCDVHISTLNM

SEQ ID NO: 75 - DNA, 1246 bp, Homo sapiens
  MMP-23
  CDS (39)...(1211): Pro-MMP-23 coding sequence
ctgccccatgcagccctgagccccacagcaagtctgccatgggccgcggggcccgtgtcccctcggaggccccgggggcaggcgtcgagcgccgctggcttggagccgcgctggtcgccctgtgcctcctccccgcgctggtgctgctggcccggctgggggccccggcggtgccggcctggagcgcagcgcagggagacgtcgctgcgctgggcctctcggcggtcccccccacccgggtcccgggcccactggccccccgcagacgccgctacacgctgactccagccaggctgcgctgggaccacttcaacctcacctacaggatcctctccttcccgcggaacctgctgagcccgcgggagacgcggcgggccctagctgccgccttccgcatgtggagcgacgtgtcccccttcagcttccgcgaggtggcccccgagcagcccagcgacctccggataggcttctacccgatcaaccacacggactgcctggtctccgcgctgcaccactgcttcgacggccccacgggggagctggcccacgccttcttccccccgcacggcggcatccacttcgacgacagcgagtactgggtcctgggccccacgcgctacagctggaagaaaggcgtgtggctcacggacctggtgcacgtggcggcccacgagatcggccacgcgctgggcctgatgcactcacaacacggccgggcgctcatgcacctgaacgccacgctgcgcggctggaaggcgttgtcccaggacgagctgtgggggctgcaccggctctacggatgcctcgacaggctgttcgtgtgcgcgtcctgggcgcggaggggcttctgcgacgctcgccggcggctcatgaagaggctctgccccagcagctgcgacttctgctacgaattccccttccccacggtggccaccaccccaccgccccccaggaccaaaaccaggctggtgcccgagggcaggaacgtgaccttccgctgcggccagaagatcctccacaagaaagggaaagtgtactggtacaaggaccaggagcccctggagttctcctaccccggctacctggccctgggcgaggcgcacctgagcatcatcgccaacgccgtcaatgagggcacctacacctgcgtggtgcgccgccagcagcgcgtgctgaccacctactcctggcgagtccgtgtgcggggctgagcccggctgataaagcactttctctctgaaaaaaa

SEQ ID NO: 76 - protein, 390 aa, Homo sapiens
  Pro-MMP-23
MGRGARVPSEAPGAGVERRWLGAALVALCLLPALVLLARLGAPAVPAWSAAQGDVAALGLSAVPPTRVPGPLAPRRRRYTLTPARLRWDHFNLTYRILSFPRNLLSPRETRRALAAAFRMWSDVSPFSFREVAPEQPSDLRIGFYPINHTDCLVSALHHCFDGPTGELAHAFFPPHGGIHFDDSEYWVLGPTRYSWKKGVWLTDLVHVAAHEIGHALGLMHSQHGRALMHLNATLRGWKALSQDELWGLHRLYGCLDRLFVCASWARRGFCDARRRLMKRLCPSSCDFCYEFPFPTVATTPPPPRTKTRLVPEGRNVTFRCGQKILHKKGKVYWYKDQEPLEFSYPGYLALGEAHLSIIANAVNEGTYTCVVRRQQRVLTTYSWRVRVRG

SEQ ID NO: 77 - protein, 8 aa, Artificial Sequence
  Cross-linked collagen C-telopeptide (CTx) epitope
  MOD_RES 5: bAsp
EKAHDGGR

SEQ ID NO: 78 - DNA, 1647 bp, Homo sapiens
  MMP-27
  CDS (24)...(1565): Pre-pro-MMP-27 coding sequence
gcttcagctgaagaaagagaggaatgaagcgccttctgcttctgtttttgttctttataacattttcttctgcatttcccttagtccggatgacggaaaatgaagaaaatatgcaactggctcaggcatatctcaaccagttctactctcttgaaatagaagggaatcatcttgttcaaagcaagaataggagtctcatagatgacaaaattcgggaaatgcaagcattttttggattgacagtgactggaaaactggactcaaacacccttgagatcatgaagacacccaggtgtggggtgcctgatgtgggccagtatggctacaccctccctgggtggagaaaatacaacctcacctacagaataataaactatactccggatatggcacgagctgctgtggatgaggctatccaagaaggtttagaagtgtggagcaaagtcactccactaaaattcaccaagatttcaaaggggattgcagacatcatgattgcctttaggactcgagtccatggtcggtgtcctcgctattttgatggtcccttgggagtgcttggccatgcctttcctcctggtccgggtctgggtggtgacactcattttgatgaggatgaaaactggaccaaggatggagcaggattcaacttgtttcttgtggctgctcatgaatttggtcatgcactggggctctctcactccaatgatcaaacagccttgatgttcccaaattatgtctccctggatcccagaaaatacccactttctcaggatgatatcaatggaatccagtccatctatggaggtctgcctaaggaacctgctaagccaaaggaacccactataccccatgcctgtgaccctgacttgacttttgacgctatcacaactttccgcagagaagtaatgttctttaaaggcaggcacctatggaggatctattatgatatcacggatgttgagtttgaattaattgcttcattctggccatctctgccagctgatctgcaagctgcatacgagaaccccagagataagattctggtttttaaagatgaaaacttctggatgatcagaggatatgctgtcttgccagattatcccaaatccatccatacattaggttttccaggacgtgtgaagaaaatagatgcagccgtctgtgataagaccacaagaaaaacctacttctttgtgggcatttggtgctggaggtttgatgaaatgacccaaaccatggacaaagggttcccgcagagagtggtaaaacactttcctggaatcagtatccgtgttgatgctgctttccagtacaaaggattcttctttttcagccgtggatcaaagcaatttgaatacgacattaagacaaagaatattacccgaatcatgagaactaatacttggtttcaatgcaaagaaccaaagaactcctcatttggttttgatatcaacaaggaaaaagcacattcaggaggcataaagatattgtatcataagagtttaagcttgtttatttttggtattgttcatttgctgaaaaacacttctatttatcaataaattcatagacctaaaataaacctcaacaggtcttttaatataaattctgcttcaaaatagaataaaaccattctttaacaac

SEQ ID NO: 79 - protein, 513 aa, Homo sapiens
  Pre-pro-MMP-27
MKRLLLLFLFFITFSSAFPLVRMTENEENMQLAQAYLNQFYSLEIEGNHLVQSKNRSLIDDKIREMQAFFGLTVTGKLDSNTLEIMKTPRCGVPDVGQYGYTLPGWRKYNLTYRIINYTPDMARAAVDEAIQEGLEVWSKVTPLKFTKISKGIADIMIAFRTRVHGRCPRYFDGPLGVLGHAFPPGPGLGGDTHFDEDENWTKDGAGFNLFLVAAHEFGHALGLSHSNDQTALMFPNYVSLDPRKYPLSQDDINGIQSIYGGLPKEPAKPKEPTIPHACDPDLTFDAITTFRREVMFFKGRHLWRIYYDITDVEFELIASFWPSLPADLQAAYENPRDKILVFKDENFWMIRGYAVLPDYPKSIHTLGFPGRVKKIDAAVCDKTTRKTYFFVGIWCWRFDEMTQTMDKGFPQRVVKHFPGISIRVDAAFQYKGFFFFSRGSKQFEYDIKTKNITRIMRTNTWFQCKEPKNSSFGFDINKEKAHSGGIKILYHKSLSLFIFGIVHLLKNTSIYQ

SEQ ID NO: 80 - protein, 496 aa, Homo sapiens
  Pro-MMP-27
FPLVRMMENEENVQLAQAYLNQFYSLEIEGNHLVQSKNRSLIDDKIREMQAFFGLTVTGKLDSNTLEIMKTPRCGVPDVGQYGYTLPGWRKYNLTYRIINYTPDMARAAVDEAIQEGLEVWSKVTPLKFTKISKGIADIMIAFRTRVHGRCPRYFDGPLGVLGHAFPPGPGLGGDTHFDEDENWTKDGAGFNLFLVAAHEFGHALGLSHSNDQTALMFPNYVSLDPRKYPLSQDDINGIQSIYGGLPKEPAKPKEPTIPHACDPDLTFDAITTFRREVMFFKGRHLWRIYYDITDVEFELIASFWPSLPADLQAAYENPRDKILVFKDENFWMIRGYAVLPDYPKSIHTLGFPGRVKKIDAAVCDKTTRKTYFFVGIWCWRFDEMTQTMDKGFPQRVVKHFPGISIRVDAAFQYKGFFFFSRGSKQFEYDIKTKNITRIMRTNTWFQCKEPKNSSFGFDINKEKAHSGGIKILYHKSLSLFIFGIVHLLKNTSIYQ

SEQ ID NO: 81 - DNA, 2480 bp, Homo sapiens
  MMP-28
  CDS (260)...(1822): Pre-pro-MMP-28 coding sequence
tccctcggtccccggggccggcggacccgcgggcaggcactgcccgggctggacgacgtctggccggctcccggcgaagggcagcggaggagcggcccagagcgcgcagctagggcactggcgaaaccccgggacagtccctctccgtgcgggggcggcgcagagcagtcccatccccggggtcccgggcgcggctgactgccggctggttccctgcgcgcagtagctccccgagccgggctgcaccggaggcggcgagatggtcgcgcgcgtcggcctcctgctgcgcgccctgcagctgctactgtggggccacctggacgcccagcccgcggagcgcggaggccaggagctgcgcaaggaggcggaggcattcctagagaagtacggatacctcaatgaacaggtccccaaagctcccacctccactcgattcagcgatgccatcagagcgtttcagtgggtgtcccagctacctgtcagcggcgtgttggaccgcgccaccctgcgccagatgactcgtccccgctgcggggttacagataccaacagttatgcggcctgggctgagaggatcagtgacttgtttgctagacaccggaccaaaatgaggcgtaagaaacgctttgcaaagcaaggtaacaaatggtacaagcagcacctctcctaccgcctggtgaactggcctgagcatctgccggagccggcagttcggggcgccgtgcgcgccgccttccagttgtggagcaacgtctcagcgctggagttctgggaggccccagccacaggccccgctgacatccggctcaccttcttccaaggggaccacaacgatgggctgggcaatgcctttgatggcccagggggcgccctggcgcacgccttcctgccccgccgcggcgaagcgcacttcgaccaagatgagcgctggtccctgagccgccgccgcgggcgcaacctgttcgtggtgctggcgcacgagatcggtcacacgcttggcctcacccactcgcccgcgccgcgcgcgctcatggcgccctactacaagaggctgggccgcgacgcgctgctcagctgggacgacgtgctggccgtgcagagcctgtatgggaagcccctagggggctcagtggccgtccagctcccaggaaagctgttcactgactttgagacctgggactcctacagcccccaaggaaggcgccctgaaacgcagggccctaaatactgccactcttccttcgatgccatcactgtagacaggcaacagcaactgtacatttttaaagggagccatttctgggaggtggcagctgatggcaacgtctcagagccccgtccactgcaggaaagatgggtcgggctgccccccaacattgaggctgcggcagtgtcattgaatgatggagatttctacttcttcaaagggggtcgatgctggaggttccggggccccaagccagtgtggggtctcccacagctgtgccgggcagggggcctgccccgccatcctgacgccgccctcttcttccctcctctgcgccgcctcatcctcttcaagggtgcccgctactacgtgctggcccgagggggactgcaagtggagccctactacccccgaagtctgcaggactggggaggcatccctgaggaggtcagcggcgccctgccgaggcccgatggctccatcatcttcttccgagatgaccgctactggcgcctcgaccaggccaaactgcaggcaaccacctcgggccgctgggccaccgagctgccctggatgggctgctggcatgccaactcggggagcgccctgttctgaaggcacctcctcacctcagaaactggtggtgctctcagggcaaaatcatgttccccacccccggggcagaacccctcttagaagcctctgagtccctctgcagaagaccgggcagcaaagcctccatctggaagtctgtctgcctttgttccttgaagaatgcagcattgtctttgtctgtccccaccacatggaggtgggggtgggatcaatcttaggaaaagcaaaaaagggtcccagatcccttggccctttcctccgaggacttctatcctccccaggcctttgtttcttcggctaaaggtacagttcctttcaagaggtaacagcactgggatccaagcagggggatgaaaaactcagcagagaaattcgagaccattttgcaagactgtgcccttctcctcaggaccccctggctcagttcttgaaaaacggtgtcatatttagtcagaggccccacccccaggaagcatggatggggatgaaggcacaggcgtctccaacctcagaggccctttgtggggtcaggacacagagtgggagggagactgatgcaggcctaccagtccctggctttttgtctggggctggaataaagaggtgccttcagctggtgggccgagaggcaggaagcagccttaaaaaaaaaaaaaaa

SEQ ID NO: 82 - protein, 520 aa, Homo sapiens
  Pre-pro-MMP-28
MVARVGLLLRALQLLLWGHLDAQPAERGGQELRKEAEAFLEKYGYLNEQVPKAPTSTRFSDAIRAFQWVSQLPVSGVLDRATLRQMTRPRCGVTDTNSYAAWAERISDLFARHRTKMRRKKRFAKQGNKWYKQHLSYRLVNWPEHLPEPAVRGAVRAAFQLWSNVSALEFWEAPATGPADIRLTFFQGDHNDGLGNAFDGPGGALAHAFLPRRGEAHFDQDERWSLSRRRGRNLFVVLAHEIGHTLGLTHSPAPRALMAPYYKRLGRDALLSWDDVLAVQSLYGKPLGGSVAVQLPGKLFTDFETWDSYSPQGRRPETQGPKYCHSSFDAITVDRQQQLYIFKGSHFWEVAADGNVSEPRPLQERWVGLPPNIEAAAVSLNDGDFYFFKGGRCWRFRGPKPVWGLPQLCRAGGLPRHPDAALFFPPLRRLILFKGARYYVLARGGLQVEPYYPRSLQDWGGIPEEVSGALPRPDGSIIFFRDDRYWRLDQAKLQATTSGRWATELPWMGCWHANSGSALF

SEQ ID NO: 83 - protein, 498 aa, Homo sapiens
  Pro-MMP-28
QPAERGGQELRKEAEAFLEKYGYLNEQVPKAPTSTRFSDAIRAFQWVSQLPVSGVLDRATLRQMTRPRCGVTDTNSYAAWAERISDLFARHRTKMRRKKRFAKQGNKWYKQHLSYRLVNWPEHLPEPAVRGAVRAAFQLWSNVSALEFWEAPATGPADIRLTFFQGDHNDGLGNAFDGPGGALAHAFLPRRGEAHFDQDERWSLSRRRGRNLFVVLAHEIGHTLGLTHSPAPRALMAPYYKRLGRDALLSWDDVLAVQSLYGKPLGGSVAVQLPGKLFTDFETWDSYSPQGRRPETQGPKYCHSSFDAITVDRQQQLYIFKGSHFWEVAADGNVSEPRPLQERWVGLPPNIEAAAVSLNDGDFYFFKGGRCWRFRGPKPVWGLPQLCRAGGLPRHPDAALFFPPLRRLILFKGARYYVLARGGLQVEPYYPRSLQDWGGIPEEVSGALPRPDGSIIFFRDDRYWRLDQAKLQATTSGRWATELPWMGCWHANSGSALF

SEQ ID NO: 84 - protein, 7 aa, Artificial Sequence
  Propeptide inhibitory motif
  VARIANT 4, 5: Xaa = Any Amino Acid
PRCXXPD

SEQ ID NO: 85 - protein, 11 aa, Artificial Sequence
  Zinc-binding motif
  VARIANT 3, 6, 7, 9, 10: Xaa = Any Amino Acid
HEXGHXXGXXH

SEQ ID NO: 86 - protein, 9 aa, Artificial Sequence
  MMP-1 catalytic motif
RWTNNFREY

SEQ ID NO: 87 - protein, 450 aa, Homo sapiens
  allelic variants of MMP-1
  VARIANT 4: Xaa = Thr or Pro
  VARIANT 10, 254: Xaa = Gln or Pro
  VARIANT 24: Xaa = Asn or Lys
  VARIANT 30: Xaa = Arg, Met, or Ser
  VARIANT 96: Xaa = Thr or Arg
  VARIANT 109: Xaa = Ala or Glu
  VARIANT 114: Xaa = Ala or Val
  VARIANT 166: Xaa = Phe or Cys
  VARIANT 172: Xaa = Ile or Val
  VARIANT 181: Xaa = Asp or His
  VARIANT 183: Xaa = Arg or Gln
  VARIANT 186: Xaa = Asn or Lys
  VARIANT 187: Xaa = Asn or Asp
  VARIANT 188: Xaa = Phe or Thr
  VARIANT 189: Xaa = Thr or Arg
  VARIANT 190: Xaa = Glu or Gly
  VARIANT 191: Xaa = Tyr or Thr
  VARIANT 199: Xaa = His or Ala
  VARIANT 200: Xaa = Glu or Ala
  VARIANT 214: Xaa = Gly or Glu
  VARIANT 232: Xaa = Asp or Asn
  VARIANT 233: Xaa = Asp or Gly
  VARIANT 243: Xaa = Arg or Ser
  VARIANT 271: Xaa = Ile or Ala
  VARIANT 272: Xaa = Arg or Ala
  VARIANT 286, 432: Xaa = Thr or Ala
  VARIANT 298: Xaa = Ile or Thr
  VARIANT 314: Xaa = Glu or Gly
  VARIANT 315: Xaa = Phe or Ser
  VARIANT 374: Xaa = Val or Met
  VARIANT 386: Xaa = Arg or Gln
  VARIANT 387: Xaa = Ser or Thr
  VARIANT 391: Xaa = Gly or Ser
FPAXLETQEXDVDLVQKYLEKYYXLKNDGXQVEKRRNSGPVVEKLKQMQEFFGLKVTGKPDAETLKVMKQPRCGVPDVAQFVLTEGNPRWEQTHLXYRIENYTPDLPRXDVDHXIEKAFQLWSNVTPLTFTKVSEGQADIMISFVRGDHRDNSPFDGPGGNLAHAXQPGPGXGGDAHFDEXEXWTXXXXXXNLHRVAAXXLGHSLGLSHSTDIXALMYPSYTFSGDVQLAQXXIDGIQAIYGXSQNPVQPIGPXTPKACDSKLTFDAITTXXGEVMFFKDRFYMRXNPFYPEVELNFXSVFWPQLPNGLEAAYXXADRDEVRFFKGNKYWAVQGQNVLHGYPKDIYSSFGFPRTVKHIDAALSEENTGKTYFFXANKYWRYDEYKXXMDPXYPKMIAHDFPGIGHKVDAVFMKDGFFYFFHGTRQYKFDPKXKRILTLQKANSWFNCRKN

SEQ ID NO: 88 - protein, 7 aa, Artificial Sequence
  Mca-K-P-L-G-L-Dpa-A-R-NH2  fluorescence substrate
  MOD_RES 1: Lys modified with (7-Methoxycoumarin-4-yl)acetyl
  MOD_RES 6: Ala modified with N-3-(2,4,-Dinitrophenyl)-L-2,3-diaminopropionyl
KPLGLAR

SEQ ID NO: 89 - protein, 6 aa, Artificial Sequence
  6xHis tag or His tag
HHHHHH

SEQ ID NO: 90 - DNA, 5369 bp, Artificial Sequence
  pET303CTHis vector
gatctcgatcccgcgaaattaatacgactcactataggggaattgtgagcggataacaattcccctctagtaataattttgtttaactttaagaaggaggtctagaatgcatctcgagcaccaccaccaccaccactgagatccggctgctaacaaagcccgaaaggaagctgagttggctgctgccaccgctgagcaataactagcataaccccttggggcctctaaacgggtcttgaggggttttttgctgaaaggaggaactatatccggattggcgaatgggacgcgccctgtagcggcgcattaagcgcggcgggtgtggtggttacgcgcagcgtgaccgctacacttgccagcgccctagcgcccgctcctttcgctttcttcccttcctttctcgccacgttcgccggctttccccgtcaagctctaaatcgggggctccctttagggttccgatttagtgctttacggcacctcgaccccaaaaaacttgattagggtgatggttcacgtagtgggccatcgccctgatagacggtttttcgccctttgacgttggagtccacgttctttaatagtggactcttgttccaaactggaacaacactcaaccctatctcggtctattcttttgatttataagggattttgccgatttcggcctattggttaaaaaatgagctgatttaacaaaaatttaacgcgaattttaacaaaatattaacgtttacaatttcaggtggcacttttcggggaaatgtgcgcggaacccctatttgtttatttttctaaatacattcaaatatgtatccgctcatgagacaataaccctgataaatgcttcaataatattgaaaaaggaagagtatgagtattcaacatttccgtgtcgcccttattcccttttttgcggcattttgccttcctgtttttgctcacccagaaacgctggtgaaagtaaaagatgctgaagatcagttgggtgcacgagtgggttacatcgaactggatctcaacagcggtaagatccttgagagttttcgccccgaagaacgttttccaatgatgagcacttttaaagttctgctatgtggcgcggtattatcccgtattgacgccgggcaagagcaactcggtcgccgcatacactattctcagaatgacttggttgagtactcaccagtcacagaaaagcatcttacggatggcatgacagtaagagaattatgcagtgctgccataaccatgagtgataacactgcggccaacttacttctgacaacgatcggaggaccgaaggagctaaccgcttttttgcacaacatgggggatcatgtaactcgccttgatcgttgggaaccggagctgaatgaagccataccaaacgacgagcgtgacaccacgatgcctgcagcaatggcaacaacgttgcgcaaactattaactggcgaactacttactctagcttcccggcaacaattaatagactggatggaggcggataaagttgcaggaccacttctgcgctcggcccttccggctggctggtttattgctgataaatctggagccggtgagcgtgggtctcgcggtatcattgcagcactggggccagatggtaagccctcccgtatcgtagttatctacacgacggggagtcaggcaactatggatgaacgaaatagacagatcgctgagataggtgcctcactgattaagcattggtaactgtcagaccaagtttactcatatatactttagattgatttaaaacttcatttttaatttaaaaggatctaggtgaagatcctttttgataatctcatgaccaaaatcccttaacgtgagttttcgttccactgagcgtcagaccccgtagaaaagatcaaaggatcttcttgagatcctttttttctgcgcgtaatctgctgcttgcaaacaaaaaaaccaccgctaccagcggtggtttgtttgccggatcaagagctaccaactctttttccgaaggtaactggcttcagcagagcgcagataccaaatactgtccttctagtgtagccgtagttaggccaccacttcaagaactctgtagcaccgcctacatacctcgctctgctaatcctgttaccagtggctgctgccagtggcgataagtcgtgtcttaccgggttggactcaagacgatagttaccggataaggcgcagcggtcgggctgaacggggggttcgtgcacacagcccagcttggagcgaacgacctacaccgaactgagatacctacagcgtgagctatgagaaagcgccacgcttcccgaagggagaaaggcggacaggtatccggtaagcggcagggtcggaacaggagagcgcacgagggagcttccagggggaaacgcctggtatctttatagtcctgtcgggtttcgccacctctgacttgagcgtcgatttttgtgatgctcgtcaggggggcggagcctatggaaaaacgccagcaacgcggcctttttacggttcctggccttttgctggccttttgctcacatgttctttcctgcgttatcccctgattctgtggataaccgtattaccgcctttgagtgagctgataccgctcgccgcagccgaacgaccgagcgcagcgagtcagtgagcgaggaagcggaagagcgcctgatgcggtattttctccttacgcatctgtgcggtatttcacaccgcaatggtgcactctcagtacaatctgctctgatgccgcatagttaagccagtatacactccgctatcgctacgtgactgggtcatggctgcgccccgacacccgccaacacccgctgacgcgccctgacgggcttgtctgctcccggcatccgcttacagacaagctgtgaccgtctccgggagctgcatgtgtcagaggttttcaccgtcatcaccgaaacgcgcgaggcagctgcggtaaagctcatcagcgtggtcgtgaagcgattcacagatgtctgcctgttcatccgcgtccagctcgttgagtttctccagaagcgttaatgtctggcttctgataaagcgggccatgttaagggcggttttttcctgtttggtcactgatgcctccgtgtaagggggatttctgttcatgggggtaatgataccgatgaaacgagagaggatgctcacgatacgggttactgatgatgaacatgcccggttactggaacgttgtgagggtaaacaactggcggtatggatgcggcgggaccagagaaaaatcactcagggtcaatgccagcgcttcgttaatacagatgtaggtgttccacagggtagccagcagcatcctgcgatgcagatccggaacataatggtgcagggcgctgacttccgcgtttccagactttacgaaacacggaaaccgaagaccattcatgttgttgctcaggtcgcagacgttttgcagcagcagtcgcttcacgttcgctcgcgtatcggtgattcattctgctaaccagtaaggcaaccccgccagcctagccgggtcctcaacgacaggagcacgatcatgcgcacccgtggggccgccatgccggcgataatggcctgcttctcgccgaaacgtttggtggcgggaccagtgacgaaggcttgagcgagggcgtgcaagattccgaataccgcaagcgacaggccgatcatcgtcgcgctccagcgaaagcggtcctcgccgaaaatgacccagagcgctgccggcacctgtcctacgagttgcatgataaagaagacagtcataagtgcggcgacgatagtcatgccccgcgcccaccggaaggagctgactgggttgaaggctctcaagggcatcggtcgagatcccggtgcctaatgagtgagctaacttacattaattgcgttgcgctcactgcccgctttccagtcgggaaacctgtcgtgccagctgcattaatgaatcggccaacgcgcggggagaggcggtttgcgtattgggcgccagggtggtttttcttttcaccagtgagacgggcaacagctgattgcccttcaccgcctggccctgagagagttgcagcaagcggtccacgctggtttgccccagcaggcgaaaatcctgtttgatggtggttaacggcgggatataacatgagctgtcttcggtatcgtcgtatcccactaccgagatatccgcaccaacgcgcagcccggactcggtaatggcgcgcattgcgcccagcgccatctgatcgttggcaaccagcatcgcagtgggaacgatgccctcattcagcatttgcatggtttgttgaaaaccggacatggcactccagtcgccttcccgttccgctatcggctgaatttgattgcgagtgagatatttatgccagccagccagacgcagacgcgccgagacagaacttaatgggcccgctaacagcgcgatttgctggtgacccaatgcgaccagatgctccacgcccagtcgcgtaccgtcttcatgggagaaaataatactgttgatgggtgtctggtcagagacatcaagaaataacgccggaacattagtgcaggcagcttccacagcaatggcatcctggtcatccagcggatagttaatgatcagcccactgacgcgttgcgcgagaagattgtgcaccgccgctttacaggcttcgacgccgcttcgttctaccatcgacaccaccacgctggcacccagttgatcggcgcgagatttaatcgccgcgacaatttgcgacggcgcgtgcagggccagactggaggtggcaacgccaatcagcaacgactgtttgcccgccagttgttgtgccacgcggttgggaatgtaattcagctccgccatcgccgcttccactttttcccgcgttttcgcagaaacgtggctggcctggttcaccacgcgggaaacggtctgataagagacaccggcatactctgcgacatcgtataacgttactggtttcacattcaccaccctgaattgactctcttccgggcgctatcatgccataccgcgaaaggttttgcgccattcgatggtgtccgggatctcgacgctctcccttatgcgactcctgcattaggaagcagcccagtagtaggttgaggccgttgagcaccgccgccgcaaggaatggtgcatgcaaggagatggcgcccaacagtcccccggccacggggcctgccaccatacccacgccgaaacaagcgctcatgagcccgaagtggcgagcccgatcttccccatcggtgatgtcggcgatataggcgccagcaaccgcacctgtggcgccggtgatgccggccacgatgcgtccggcgtagaggatcga

SEQ ID NO: 91 - protein, 7 aa, Artificial Sequence
  Flag tag
DYKDDDK

SEQ ID NO: 92 - protein, 22 aa, Homo sapiens
  IgK signal sequence
MDMRVPAQLLGLLLLWLPGARG

SEQ ID NO: 93 - protein, 435 aa, Homo sapiens
  Hyaluronidase-1 [Precursor]
MAAHLLPICALFLTLLDMAQGFRGPLLPNRPFTTVWNANTQWCLERHGVDVDVSVFDVVANPGQTFRGPDMTIFYSSQLGTYPYYTPTGEPVFGGLPQNASLIAHLARTFQDILAAIPAPDFSGLAVIDWEAWRPRWAFNWDTKDIYRQRSRALVQAQHPDWPAPQVEAVAQDQFQGAARAWMAGTLQLGRALRPRGLWGFYGFPDCYNYDFLSPNYTGQCPSGIRAQNDQLGWLWGQSRALYPSIYMPAVLEGTGKSQMYVQHRVAEAFRVAVAAGDPNLPVLPYVQIFYDTTNHFLPLDELEHSLGESAAQGAAGVVLWVSWENTRTKESCQAIKEYMDTTLGPFILNVTSGALLCSQALCSGHGRCVRRTSHPKALLLLNPASFSIQLTPGGGPLSLRGALSLEDQAQMAVEFKCRCYPGWQAPWCERKSMW

SEQ ID NO: 94 - protein, 473 aa, Homo sapiens
  Hyaluronidase-2 [Precursor]
MRAGPGPTVTLALVLAVAWAMELKPTAPPIFTGRPFVVAWDVPTQDCGPRLKVPLDLNAFDVQASPNEGFVNQNITIFYRDRLGLYPRFDSAGRSVHGGVPQNVSLWAHRKMLQKRVEHYIRTQESAGLAVIDWEDWRPVWVRNWQDKDVYRRLSRQLVASRHPDWPPDRIVKQAQYEFEFAAQQFMLETLRYVKAVRPRHLWGFYLFPDCYNHDYVQNWESYTGRCPDVEVARNDQLAWLWAESTALFPSVYLDETLASSRHGRNFVSFRVQEALRVARTHHANHALPVYVFTRPTYSRRLTGLSEMDLISTIGESAALGAAGVILWGDAGYTTSTETCQYLKDYLTRLLVPYVVNVSWATQYCSRAQCHGHGRCVRRNPSASTFLHLSTNSFRLVPGHAPGEPQLRPVGELSWADIDHLQTHFRCQCYLGWSGEQCQWDHRQAAGGASEAWAGSHLTSLLALAALAFTWTL

SEQ ID NO: 95 - protein, 417 aa, Homo sapiens
  Hyaluronidase-3 [Precursor]
MTTQLGPALVLGVALCLGCGQPLPQVPERPFSVLWNVPSAHCEARFGVHLPLNALGIIANRGQHFHGQNMTIFYKNQLGLYPYFGPRGTAHNGGIPQALPLDRHLALAAYQIHHSLRPGFAGPAVLDWEEWCPLWAGNWGRRRAYQAASWAWAQQVFPDLDPQEQLYKAYTGFEQAARALMEDTLRVAQALRPHGLWGFYHYPACGNGWHSMASNYTGRCHAATLARNTQLHWLWAASSALFPSIYLPPRLPPAHHQAFVRHRLEEAFRVALVGHRHPLPVLAYVRLTHRRSGRFLSQDDLVQSIGVSAALGAAGVVLWGDLSLSSSEEECWHLHDYLVDTLGPYVINVTRAAMACSHQRCHGHGRCARRDPGQMEAFLHLWPDGSLGDWKSFSCHCYWGWAGPTCQEPRPGPKEAV

SEQ ID NO: 96 - protein, 481 aa, Homo sapiens
  Mature Hyaluronidase-4
MKVLSEGQLKLCVVQPVHLTSWLLIFFILKSISCLKPARLPIYQRKPFIAAWNAPTDQCLIKYNLRLNLKMFPVIGSPLAKARGQNVTIFYVNRLGYYPWYTSQGVPINGGLPQNISLQVHLEKADQDINYYIPAEDFSGLAVIDWEYWRPQWARNWNSKDVYRQKSRKLISDMGKNVSATDIEYLAKVTFEESAKAFMKETIKLGIKSRPKGLWGYYLYPDCHNYNVYAPNYSGSCPEDEVLRNNELSWLWNSSAALYPSIGVWKSLGDSENILRFSKFRVHESMRISTMTSHDYALPVFVYTRLGYRDEPLFFLSKQDLVSTIGESAALGAAGIVIWGDMNLTASKANCTKVKQFVSSDLGSYIANVTRAAEVCSLHLCRNNGRCIRKMWNAPSYLHLNPASYHIEASEDGEFTVKGKASDTDLAVMADTFSCHCYQGYEGADCREIKTADGCSGVSPSPGSLMTLCLLLLASYRSIQL

SEQ ID NO: 97 - protein, 509 aa, Homo sapiens
  PH20/SPAM1 [Precursor]
MGVLKFKHIFFRSFVKSSGVSQIVFTFLLIPCCLTLNFRAPPVIPNVPFLWAWNAPSEFCLGKFDEPLDMSLFSFIGSPRINATGQGVTIFYVDRLGYYPYIDSITGVTVNGGIPQKISLQDHLDKAKKDITFYMPVDNLGMAVIDWEEWRPTWARNWKPKDVYKNRSIELVQQQNVQLSLTEATEKAKQEFEKAGKDFLVETIKLGKLLRPNHLWGYYLFPDCYNHHYKKPGYNGSCFNVEIKRNDDLSWLWNESTALYPSIYLNTQQSPVAATLYVRNRVREAIRVSKIPDAKSPLPVFAYTRIVFTDQVLKFLSQDELVYTFGETVALGASGIVIWGTLSIMRSMKSCLLLDNYMETILNPYIINVTLAAKMCSQVLCQEQGVCIRKNWNSSDYLHLNPDNFAIQLEKGGKFTVRGKPTLEDLEQFSEKFYCSCYSTLSCKEKADVKDTDAVDVCIADGVCIDAFLKPPMETEEPQIFYNASPSTLSATMFIVSILFLIISSVASL

SEQ ID NO: 98 - DNA, 6630 bp, Artificial Sequence
  pCI-P1-120-IRES-DHFR-SV40pa (HZ24) with PH20 and DHFR (Gen1/Gen2)
tcaatattggccattagccatattattcattggttatatagcataaatcaatattggctattggccattgcatacgttgtatctatatcataatatgtacatttatattggctcatgtccaatatgaccgccatgttggcattgattattgactagttattaatagtaatcaattacggggtcattagttcatagcccatatatggagttccgcgttacataacttacggtaaatggcccgcctggctgaccgcccaacgacccccgcccattgacgtcaataatgacgtatgttcccatagtaacgccaatagggactttccattgacgtcaatgggtggagtatttacggtaaactgcccacttggcagtacatcaagtgtatcatatgccaagtccgccccctattgacgtcaatgacggtaaatggcccgcctggcattatgcccagtacatgaccttacgggactttcctacttggcagtacatctacgtattagtcatcgctattaccatggtgatgcggttttggcagtacaccaatgggcgtggatagcggtttgactcacggggatttccaagtctccaccccattgacgtcaatgggagtttgttttggcaccaaaatcaacgggactttccaaaatgtcgtaataaccccgccccgttgacgcaaatgggcggtaggcgtgtacggtgggaggtctatataagcagagctcgtttagtgaaccgtcagatcactagaagctttattgcggtagtttatcacagttaaattgctaacgcagtcagtgcttctgacacaacagtctcgaacttaagctgcagaagttggtcgtgaggcactgggcaggtaagtatcaaggttacaagacaggtttaaggagaccaatagaaactgggcttgtcgagacagagaagactcttgcgtttctgataggcacctattggtcttactgacatccactttgcctttctctccacaggtgtccactcccagttcaattacagctcttaaggctagagtacttaatacgactcactataggctagcatgggagtgctaaaattcaagcacatctttttcagaagctttgttaaatcaagtggagtatcccagatagttttcaccttccttctgattccatgttgcttgactctgaatttcagagcacctcctgttattccaaatgtgcctttcctctgggcctggaatgccccaagtgaattttgtcttggaaaatttgatgagccactagatatgagcctcttctctttcataggaagcccccgaataaacgccaccgggcaaggtgttacaatattttatgttgatagacttggctactatccttacatagattcaatcacaggagtaactgtgaatggaggaatcccccagaagatttccttacaagaccatctggacaaagctaagaaagacattacattttatatgccagtagacaatttgggaatggctgttattgactgggaagaatggagacccacttgggcaagaaactggaaacctaaagatgtttacaagaataggtctattgaattggttcagcaacaaaatgtacaacttagtctcacagaggccactgagaaagcaaaacaagaatttgaaaaggcagggaaggatttcctggtagagactataaaattgggaaaattacttcggccaaatcacttgtggggttattatctttttccggattgttacaaccatcactataagaaacccggttacaatggaagttgcttcaatgtagaaataaaaagaaatgatgatctcagctggttgtggaatgaaagcactgctctttacccatccatttatttgaacactcagcagtctcctgtagctgctacactctatgtgcgcaatcgagttcgggaagccatcagagtttccaaaatacctgatgcaaaaagtccacttccggtttttgcatatacccgcatagtttttactgatcaagttttgaaattcctttctcaagatgaacttgtgtatacatttggcgaaactgttgctctgggtgcttctggaattgtaatatggggaaccctcagtataatgcgaagtatgaaatcttgcttgctcctagacaattacatggagactatactgaatccttacataatcaacgtcacactagcagccaaaatgtgtagccaagtgctttgccaggagcaaggagtgtgtataaggaaaaactggaattcaagtgactatcttcacctcaacccagataattttgctattcaacttgagaaaggtggaaagttcacagtacgtggaaaaccgacacttgaagacctggagcaattttctgaaaaattttattgcagctgttatagcaccttgagttgtaaggagaaagctgatgtaaaagacactgatgctgttgatgtgtgtattgctgatggtgtctgtatagatgcttttctaaaacctcccatggagacagaagaacctcaaattttctactgaggatccatagctaacgcccctctccctcccccccccctaacgttactggccgaagccgcttggaataaggccggtgtgcgtttgtctatatgttattttccaccatattgccgtcttttggcaatgtgagggcccggaaacctggccctgtcttcttgacgagcattcctaggggtctttcccctctcgccaaaggaatgcaaggtctgttgaatgtcgtgaaggaagcagttcctctggaagcttcttgaagacaaacaacgtctgtagcgaccctttgcaggcagcggaaccccccacctggcgacaggtgcctctgcggccaaaagccacgtgtataagatacacctgcaaaggcggcacaaccccagtgccacgttgtgagttggatagttgtggaaagagtcaaatggctctcctcaagcgtattcaacaaggggctgaaggatgcccagaaggtaccccattgtatgggatctgatctggggcctcggtgcacatgctttacatgtgtttagtcgaggttaaaaaaacgtctaggccccccgaaccacggggacgtggttttcctttgaaaaacacgatgataagcttgccacaacccacagcggccgctgccatcatggttcgaccattgaactgcatcgtcgccgtgtcccaaaatatggggattggcaagaacggagacctaccctggcctccgctcaggaacgagttcaagtacttccaaagaatgaccacaacctcttcagtggaaggtaaacagaatctggtgattatgggtaggaaaacctggttctccattcctgagaagaatcgacctttaaaggacagaattaatatagttctcagtagagaactcaaagaaccaccacgaggagctcattttcttgccaaaagtttggatgatgccttaagacttattgaacaaccggaattggcaagtaaagtagacatggtttggatagtcggaggcagttctgtttaccaggaagccatgaatcaaccaggccacctcagactctttgtgacaaggatcatgcaggaatttgaaagtgacacgtttttcccagaaattgatttggggaaatataaacttctcccagaatacccaggcgtcctctctgaggtccaggaggaaaaaggcatcaagtataagtttgaagtctacgagaagaaagactaaacgcgtggtacctctagagtcgacccgggcggccgcttcgagcagacatgataagatacattgatgagtttggacaaaccacaactagaatgcagtgaaaaaaatgctttatttgtgaaatttgtgatgctattgctttatttgtaaccattataagctgcaataaacaagttaacaacaacaattgcattcattttatgtttcaggttcagggggagatgtgggaggttttttaaagcaagtaaaacctctacaaatgtggtaaaatcgataaggatccgggctggcgtaatagcgaagaggcccgcaccgatcgcccttcccaacagttgcgcagcctgaatggcgaatggacgcgccctgtagcggcgcattaagcgcggcgggtgtggtggttacgcgcagcgtgaccgctacacttgccagcgccctagcgcccgctcctttcgctttcttcccttcctttctcgccacgttcgccggctttccccgtcaagctctaaatcgggggctccctttagggttccgatttagtgctttacggcacctcgaccccaaaaaacttgattagggtgatggttcacgtagtgggccatcgccctgatagacggtttttcgccctttgacgttggagtccacgttctttaatagtggactcttgttccaaactggaacaacactcaaccctatctcggtctattcttttgatttataagggattttgccgatttcggcctattggttaaaaaatgagctgatttaacaaaaatttaacgcgaattttaacaaaatattaacgcttacaatttcctgatgcggtattttctccttacgcatctgtgcggtatttcacaccgcatatggtgcactctcagtacaatctgctctgatgccgcatagttaagccagccccgacacccgccaacacccgctgacgcgccctgacgggcttgtctgctcccggcatccgcttacagacaagctgtgaccgtctccgggagctgcatgtgtcagaggttttcaccgtcatcaccgaaacgcgcgagacgaaagggcctcgtgatacgcctatttttataggttaatgtcatgataataatggtttcttagacgtcaggtggcacttttcggggaaatgtgcgcggaacccctatttgtttatttttctaaatacattcaaatatgtatccgctcatgagacaataaccctgataaatgcttcaataatattgaaaaaggaagagtatgagtattcaacatttccgtgtcgcccttattcccttttttgcggcattttgccttcctgtttttgctcacccagaaacgctggtgaaagtaaaagatgctgaagatcagttgggtgcacgagtgggttacatcgaactggatctcaacagcggtaagatccttgagagttttcgccccgaagaacgttttccaatgatgagcacttttaaagttctgctatgtggcgcggtattatcccgtattgacgccgggcaagagcaactcggtcgccgcatacactattctcagaatgacttggttgagtactcaccagtcacagaaaagcatcttacggatggcatgacagtaagagaattatgcagtgctgccataaccatgagtgataacactgcggccaacttacttctgacaacgatcggaggaccgaaggagctaaccgcttttttgcacaacatgggggatcatgtaactcgccttgatcgttgggaaccggagctgaatgaagccataccaaacgacgagcgtgacaccacgatgcctgtagcaatggcaacaacgttgcgcaaactattaactggcgaactacttactctagcttcccggcaacaattaatagactggatggaggcggataaagttgcaggaccacttctgcgctcggcccttccggctggctggtttattgctgataaatctggagccggtgagcgtgggtctcgcggtatcattgcagcactggggccagatggtaagccctcccgtatcgtagttatctacacgacggggagtcaggcaactatggatgaacgaaatagacagatcgctgagataggtgcctcactgattaagcattggtaactgtcagaccaagtttactcatatatactttagattgatttaaaacttcatttttaatttaaaaggatctaggtgaagatcctttttgataatctcatgaccaaaatcccttaacgtgagttttcgttccactgagcgtcagaccccgtagaaaagatcaaaggatcttcttgagatcctttttttctgcgcgtaatctgctgcttgcaaacaaaaaaaccaccgctaccagcggtggtttgtttgccggatcaagagctaccaactctttttccgaaggtaactggcttcagcagagcgcagataccaaatactgttcttctagtgtagccgtagttaggccaccacttcaagaactctgtagcaccgcctacatacctcgctctgctaatcctgttaccagtggctgctgccagtggcgataagtcgtgtcttaccgggttggactcaagacgatagttaccggataaggcgcagcggtcgggctgaacggggggttcgtgcacacagcccagcttggagcgaacgacctacaccgaactgagatacctacagcgtgagctatgagaaagcgccacgcttcccgaagggagaaaggcggacaggtatccggtaagcggcagggtcggaacaggagagcgcacgagggagcttccagggggaaacgcctggtatctttatagtcctgtcgggtttcgccacctctgacttgagcgtcgatttttgtgatgctcgtcaggggggcggagcctatggaaaaacgccagcaacgcggcctttttacggttcctggccttttgctggccttttgctcacatggctcgacagatct

SEQ ID NO: 99 - protein, 482 aa, Homo sapiens
  Soluble rHuPH20 [Precursor]
MGVLKFKHIFFRSFVKSSGVSQIVFTFLLIPCCLTLNFRAPPVIPNVPFLWAWNAPSEFCLGKFDEPLDMSLFSFIGSPRINATGQGVTIFYVDRLGYYPYIDSITGVTVNGGIPQKISLQDHLDKAKKDITFYMPVDNLGMAVIDWEEWRPTWARNWKPKDVYKNRSIELVQQQNVQLSLTEATEKAKQEFEKAGKDFLVETIKLGKLLRPNHLWGYYLFPDCYNHHYKKPGYNGSCFNVEIKRNDDLSWLWNESTALYPSIYLNTQQSPVAATLYVRNRVREAIRVSKIPDAKSPLPVFAYTRIVFTDQVLKFLSQDELVYTFGETVALGASGIVIWGTLSIMRSMKSCLLLDNYMETILNPYIINVTLAAKMCSQVLCQEQGVCIRKNWNSSDYLHLNPDNFAIQLEKGGKFTVRGKPTLEDLEQFSEKFYCSCYSTLSCKEKADVKDTDAVDVCIADGVCIDAFLKPPMETEEPQIFY

SEQ ID NO: 100 - protein, 447 aa, Homo sapiens [sequence omitted]

SEQ ID NO: 101 - protein, 446 aa, Homo sapiens
  Soluble rHuPH20 1-446
LNFRAPPVIPNVPFLWAWNAPSEFCLGKFDEPLDMSLFSFIGSPRINATGQGVTIFYVDRLGYYPYIDSITGVTVNGGIPQKISLQDHLDKAKKDITFYMPVDNLGMAVIDWEEWRPTWARNWKPKDVYKNRSIELVQQQNVQLSLTEATEKAKQEFEKAGKDFLVETIKLGKLLRPNHLWGYYLFPDCYNHHYKKPGYNGSCFNVEIKRNDDLSWLWNESTALYPSIYLNTQQSPVAATLYVRNRVREAIRVSKIPDAKSPLPVFAYTRIVFTDQVLKFLSQDELVYTFGETVALGASGIVIWGTLSIMRSMKSCLLLDNYMETILNPYIINVTLAAKMCSQVLCQEQGVCIRKNWNSSDYLHLNPDNFAIQLEKGGKFTVRGKPTLEDLEQFSEKFYCSCYSTLSCKEKADVKDTDAVDVCIADGVCIDAFLKPPMETEEPQIF

SEQ ID NO: 102 - protein, 445 aa, Homo sapiens
  Soluble rHuPH20 1-445
LNFRAPPVIPNVPFLWAWNAPSEFCLGKFDEPLDMSLFSFIGSPRINATGQGVTIFYVDRLGYYPYIDSITGVTVNGGIPQKISLQDHLDKAKKDITFYMPVDNLGMAVIDWEEWRPTWARNWKPKDVYKNRSIELVQQQNVQLSLTEATEKAKQEFEKAGKDFLVETIKLGKLLRPNHLWGYYLFPDCYNHHYKKPGYNGSCFNVEIKRNDDLSWLWNESTALYPSIYLNTQQSPVAATLYVRNRVREAIRVSKIPDAKSPLPVFAYTRIVFTDQVLKFLSQDELVYTFGETVALGASGIVIWGTLSIMRSMKSCLLLDNYMETILNPYIINVTLAAKMCSQVLCQEQGVCIRKNWNSSDYLHLNPDNFAIQLEKGGKFTVRGKPTLEDLEQFSEKFYCSCYSTLSCKEKADVKDTDAVDVCIADGVCIDAFLKPPMETEEPQI

SEQ ID NO: 103 - protein, 444 aa, Homo sapiens
  Soluble rHuPH20 1-444
LNFRAPPVIPNVPFLWAWNAPSEFCLGKFDEPLDMSLFSFIGSPRINATGQGVTIFYVDRLGYYPYIDSITGVTVNGGIPQKISLQDHLDKAKKDITFYMPVDNLGMAVIDWEEWRPTWARNWKPKDVYKNRSIELVQQQNVQLSLTEATEKAKQEFEKAGKDFLVETIKLGKLLRPNHLWGYYLFPDCYNHHYKKPGYNGSCFNVEIKRNDDLSWLWNESTALYPSIYLNTQQSPVAATLYVRNRVREAIRVSKIPDAKSPLPVFAYTRIVFTDQVLKFLSQDELVYTFGETVALGASGIVIWGTLSIMRSMKSCLLLDNYMETILNPYIINVTLAAKMCSQVLCQEQGVCIRKNWNSSDYLHLNPDNFAIQLEKGGKFTVRGKPTLEDLEQFSEKFYCSCYSTLSCKEKADVKDTDAVDVCIADGVCIDAFLKPPMETEEPQ

SEQ ID NO: 104 - protein, 443 aa, Homo sapiens
  Soluble rHuPH20 1-443
LNFRAPPVIPNVPFLWAWNAPSEFCLGKFDEPLDMSLFSFIGSPRINATGQGVTIFYVDRLGYYPYIDSITGVTVNGGIPQKISLQDHLDKAKKDITFYMPVDNLGMAVIDWEEWRPTWARNWKPKDVYKNRSIELVQQQNVQLSLTEATEKAKQEFEKAGKDFLVETIKLGKLLRPNHLWGYYLFPDCYNHHYKKPGYNGSCFNVEIKRNDDLSWLWNESTALYPSIYLNTQQSPVAATLYVRNRVREAIRVSKIPDAKSPLPVFAYTRIVFTDQVLKFLSQDELVYTFGETVALGASGIVIWGTLSIMRSMKSCLLLDNYMETILNPYIINVTLAAKMCSQVLCQEQGVCIRKNWNSSDYLHLNPDNFAIQLEKGGKFTVRGKPTLEDLEQFSEKFYCSCYSTLSCKEKADVKDTDAVDVCIADGVCIDAFLKPPMETEEP

SEQ ID NO: 105 - protein, 442 aa, Homo sapiens
  Soluble rHuPH20 1-442
LNFRAPPVIPNVPFLWAWNAPSEFCLGKFDEPLDMSLFSFIGSPRINATGQGVTIFYVDRLGYYPYIDSITGVTVNGGIPQKISLQDHLDKAKKDITFYMPVDNLGMAVIDWEEWRPTWARNWKPKDVYKNRSIELVQQQNVQLSLTEATEKAKQEFEKAGKDFLVETIKLGKLLRPNHLWGYYLFPDCYNHHYKKPGYNGSCFNVEIKRNDDLSWLWNESTALYPSIYLNTQQSPVAATLYVRNRVREAIRVSKIPDAKSPLPVFAYTRIVFTDQVLKFLSQDELVYTFGETVALGASGIVIWGTLSIMRSMKSCLLLDNYMETILNPYIINVTLAAKMCSQVLCQEQGVCIRKNWNSSDYLHLNPDNFAIQLEKGGKFTVRGKPTLEDLEQFSEKFYCSCYSTLSCKEKADVKDTDAVDVCIADGVCIDAFLKPPMETEE

SEQ ID NO: 106 - protein, 450 aa, Bos taurus
  Hyaluronidase
MRPFSLEVSLHLPWAMAAHLLPVCTLFLNLLSMTQGSRDPVVPNQPFTTIWNANTEWCMKKHGVDVDISIFDVVTNPGQTFRGPNMTIFYSSQLGTYPYYTSAGEPVFGGLPQNASLNAHLARTFQDILAAMPEPRFSGLAVIDWEAWRPRWAFNWDTKDIYRQRSRALVQKQHPDWLAPRVEAAAQDQFEGAAEEWMAGTLKLGQALRPQGLWGFYNFPECYNYDFKSPNYTGRCPLNICAQNDQLGWLWGQSRALYPSIYLPAALEGTKKTQMFVQHRVAEAFRVAAGAGDPKLPVLPYMQLFYDMTNHFLPAEELEHSLGESAAQGAAGVVLWVSWLSTSTKESCQAIKEYVDTTLGPSILNVTSGARLCSQVLCSGHGRCARRPSYPKARLILNSTSFSIKPTPGGGPLTLQGALSLEDRLRMAVEFECRCYRGWRGTRCEQWGMW

SEQ ID NO: 107 - protein, 462 aa, Mus musculus
  Hyaluronidase
MLGLTQHAQKVWRMKPFSPEVSPGSSPATAGHLLRISTLFLTLLELAQVCRGSVVSNRPFITVWNGDTHWCLTEYGVDVDVSVFDVVANKEQSFQGSNMTIFYREELGTYPYYTPTGEPVFGGLPQNASLVTHLAHTFQDIKAAMPEPDFSGLAVIDWEAWRPRWAFNWDSKDIYRQRSMELVQAEHPDWPETLVEAAAKNQFQEAAEAWMAGTLQLGQVLRPRGLWGYYGFPDCYNNDFLSLNYTGQCPVFVRDQNDQLGWLWNQSYALYPSIYLPAALMGTGKSQMYVRHRVQEALRVAIVSRDPHVPVMPYVQIFYEMTDYLLPLEELEHSLGESAAQGVAGAVLWLSSDKTSTKESCQAIKAYMDSTLGPFIVNVTSAALLCSEALCSGHGRCVRHPSYPEALLTLNPASFSIELTHDGRPPSLKGTLSLKDRAQMAMKFRCRCYRGWRGKWCDKRGM

SEQ ID NO: 108 - protein, 473 aa, Mus musculus
  Hyaluronidase 2
MRAGLGPIITLALVLEVAWAGELKPTAPPIFTGRPFVVAWNVPTQECAPRHKVPLDLRAFDVKATPNEGFFNQNITTFYYDRLGLYPRFDAAGTSVHGGVPQNGSLCAHLPMLKESVERYIQTQEPGGLAVIDWEEWRPVWVRNWQEKDVYRQSSRQLVASRHPDWPSDRVMKQAQYEFEFAARQFMLNTLRYVKAVRPQHLWGFYLFPDCYNHDYVQNWESYTGRCPDVEVARNDQLAWLWAESTALFPSVYLDETLASSVHSRNFVSFRVREALRVAHTHHANHALPVYVFTRPTYTRGLTGLSQVDLISTIGESAALGSAGVIFWGDSEDASSMETCQYLKNYLTQLLVPYIVNVSWATQYCSWTQCHGHGRCVRRNPSANTFLHLNASSFRLVPGHTPSEPQLRPEGQLSEADLNYLQKHFRCQCYLGWGGEQCQRNYKGAAGNASRAWAGSHLTSLLGLVAVALTWTL

SEQ ID NO: 109 - protein, 412 aa, Mus musculus
  Hyaluronidase 3
MIMHLGLMMVVGLTLCLMHGQALLQVPEHPFSVVWNVPSARCKAHFGVHLPLDALGIVANHGQHFHGQNISIFYKNQFGLYPYFGPRGTAHNGGIPQAVSLDHHLARAAHQILHSLGSSFAGLAVLDWEEWYPLWAGNWGPHRQVYLAASWVWTQQMFPGLDPQEQLHKAHTSFEQAARALMEYTLQLGRTLRPSGLWGFYRYPACGNGWHKMASNYTGHCHAAITTQNTQLRWLWAASSALFPSIYLPPRLPLAYRQAFVRHRLEEAFRVALLEHSHPLPVLAYSRLTHRSSGRFLSLDDLMQTIGVSAALGTAGVVLWGDLSFSSSEEKCWRLHDYLVGTLGPYVINVTKADMACSHQRCHGHGRCARKDPGQMEAFLHLQPDDSLGAWNSFRCHCYSGWAGPTCLEPKP

SEQ ID NO: 110 - protein, 435 aa, Sus scrofa
  Hyaluronidase
MAAHLLPICTLFLNLLSVAQGSRDPVVLNRPFTTIWNANTQWCLKRHGVDVDVSVFEVVVNPGQTFRGPNMTIFYSSQLGTYPYYTSAGEPVFGGLPQNASLDVHLNRTFKDILAAMPESNFSGLAVIDWEAWRPRWAFNWDAKDIYRQRSRALVQKQHPDWPAPWVEAAAQDQFQEAAQTWMAGTLKLGQTLRPHGLWGFYGFPDCYNYDFQSSNYTGQCPPGVSAQNDQLGWLWGQSRALYPSIYLPSALEGTNKTQLYVQHRVNEAFRVAAAAGDPNLPVLPYAQIFHDMTNRLLSREELEHSLGESAAQGAAGVVLWVSWENTRTKESCQSIKEYVDTTLGPFILNVTSGALLCSQAVCSGHGRCVRRPSHTEALPILNPSSFSIKPTPGGGPLTLQGALSLKDRVQMAEEFQCRCYPGWRGTWCEQQGTR

SEQ ID NO: 111 - protein, 419 aa, Sus scrofa
  Hyaluronidase 3
MTMQLGLALVLGVAMCLGCGQPLLRAPERPFCVLWNVPSARCKARFGVHLPLEALGITANHGQRFHGQNITIFYKSQLGLYPYFGPRGTAHNGGIPQAVSLDHHLARAAYQIHRSLRPGFTGLAVLDWEEWCPLWAGNWGRRQAYQAASCAWAQRVYPNLDPQEQLCKARAGFEEAARALMEDTLRLGRMLRPHGLWGFYHYPACGNGWHGTASNYTGHCHAAALARNTQLYWLWAASSALFPSIYLPPGLPPAYHQAFVRYRLEEAFRVALVGHPHPLPVLAYARLTHRNSGRFLSQDELVQTIGVSAALGASGVVLWGDLSFSSSEEECWHLRGYLVGTLGPYVINVTRAAMACSHQRCHGHGRCAWQDPGQLKVFLHLHPGGSPGAWESFSCRCYWGWAGPTCQEPRPELGPEEAT

SEQ ID NO: 112 - protein, 449 aa, Rattus norvegicus
  Hyaluronidase 1
MKPFSPEVSPDPCPATAAHLLRTYTLFLTLLELAQGCRGSMVSNRPFITVWNADTHWCLKDHGVDVDVSVFDVVANKEQNFQGPNMTIFYREELGTYPYYTPTGEPVFGGLPQNASLVTHLAHAFQDIKAAMPEPDFSGLAVIDWEAWRPRWAFNWDSKDIYQQRSMELVRAEHPDWPETLVEAEAQGQFQEAAEAWMAGTLQLGQVLRPRGLWGYYGFPDCYNYDFLSPNYTGQCSLSIHDQNDQLGWLWNQSYALYPSIYLPAALMGTGKSQMYVRYRVQEAFRLALVSRDPHVPIMPYVQIFYEKTDYLLPLEELEHSLGESAAQGAAGAVLWISSEKTSTKESCQAIKAYMDSTLGPFILNVTSAALLCSEALCSGRGRCVRHPSYPEALLTLSPASFSIEPTHDGRPLSLKGTLSLKDRAQMAMKFKCRCYRGWSGEWCKKQDM

SEQ ID NO: 113 - protein, 473 aa, Rattus norvegicus
  Hyaluronidase 2
MRAGLGPIITLALVLEVAWASELKPTAPPIFTGRPFVVAWNVPTQECAPRHKVPLDLRAFDVEATPNEGFFNQNITTFYYDRLGLYPRFDAAGMSVHGGVPQNGSLCAHLPMLKEAVERYIQTQEPAGLAVIDWEEWRPVWVRNWQEKDVYRQSSRQLVASRHPDWPSDRIVKQAQYEFEFAARQFMLNTLRYVKAVRPQHLWGFYLFPDCYNHDYVQNWDSYTGRCPDVEVAQNDQLAWLWAENTALFPSVYLDKTLASSKHSRNFVSFRVQEALRVAHTHHANHALPVYVFTRPTYTRRLTELNQMDLISTIGESAALGSAGVIFWGDSVYASSMENCQNLKKYLTQTLVPYIVNVSWATQYCSWTQCHGHGRCVRRNPSASTFLHLSPSSFRLVPGRTPSEPQLRPEGELSEDDLSYLQMHFRCHCYLGWGGEQCQWNHKRAAGDASRAWAGAHLASLLGLVAMTLTWTL

SEQ ID NO: 114 - protein, 412 aa, Rattus norvegicus
  Hyaluronidase 3
MITQLGLTLVVGLTLCLVHVQALLQVPEFPFSVLWNVPSARCKTRFGVHLPLDALGIIANHGQRFHGQNITIFYKNQFGLYPYFGPRGTAHNGGIPQAVSLDHHLAQAAHQILHNLGSSFAGLAVLDWEEWYPLWAGNWGTHRQVYQAASWAWAQQMFPDLNPQEQLHKAQTGFEQAARALMEHTLRLGQMLRPHGLWGFYRYPVCGNGWHNMASNYTGHCHPAIITRNTQLRWLWAASSALFPSIYLPPRLPPAYHQTFVRHRLEEAFRVALTGHAHPLPVLAYVRLTHRSSGRFLSLDDLMQTIGVSAALGAAGVVLWGDLSVSSSEEECWRLHDYLVGTLGPYVINVTKAATACSHQRCHGHGRCSWKDPGQMEAFLHLQPDDNLGAWKSFRCRCYLGWSGPTCLEPKP

SEQ ID NO: 115 - protein, 545 aa, Oryctolagus cuniculus
  PH20
MGVLKFKHIFFGSAVELSGVFQIVFIFLLIPCCLTANFRAPPVIPNVPFLWAWNAPTEFCLGKSGEPLDMSLFSLFGSPRKNKTGQGITIFYVDRLGYYPYIDPHTGAIVHGRIPQLGPLQQHLTKLRQEILYYMPKDNVGLAVIDWEEWLPTWLRNWKPKDIYRIKSIELVKSQHPQYNHSYATEKAKRDFEKAGKDFMEETLKLGRLLRPNHLWGYYLFPDCYNHHYDKPNLYKGSCFDIEKKRNDDLSWLWKESTALFPSVYLTSRARSATALSKLYVVRNRVHEAIRVSKIPDDKSPLPNFVYTRLVFTDQIFQFLSHHDLVYTIGEIVALGASGIVVWGSQSLARSMKSCLHLDNYMKTILNPYLINVTLAAKMCNQVLCQEQGVCTRKNWNPNDYLHLNPGNFAIQLGSNGTYKVDGKPTLTDLEQFSKNFQCSCYTNLNCKERTDMNNVRTVNVCAVENVCIDTNVGPQAVTYAPKEKKDVAHILSNTTSINSSTTMSLPFPRKHVSGCLLVLCMYSQYLNICYRLVAIGIQHGYYLK

SEQ ID NO: 116 - protein, 476 aa, Ovis aries
  Hyaluronidase 2
MWTGLGPAVTLALVLVVAWATELKPTAPPIFTGRPFVVAWDVPTQDCGPRHKMPLDPKDMKAFDVQASPNEGFVNQNITIFYRDRLGMYPHFNSVGRSVHGGVPQNGSLWVHLEMLKGHVEHYIRTQEPAGLAVIDWEDWRPVWVRNWQDKDVYRRLSRQLVASHHPDWPPERIVKEAQYEFEFAARQFMLETLRFVKAFRPRHLWGFYLFPDCYNHDYVQNWETYTGRCPDVEVSRNDQLSWLWAESTALFPSVYLEETLASSTHGRNFVSFRVQEALRVADVHHANHALPVYVFTRPTYSRGLTGLSEMDLISTIGESAALGAAGVILWGDAGFTTSNETCRRLKDYLTRSLVPYVVNVSWAAQYCSWAQCHGHGRCVRRDPNAHTFLHLSASSFRLVPSHAPDEPRLRPEGELSWADRNHLQTHFRCQCYLGWGGEQCQWDRRRAAGGASGAWAGSHLTGLLAVAVLAFTWTS

SEQ ID NO: 117 - protein, 414 aa, Pongo pygmaeus
  Hyaluronidase 3
MTTRLGPALVLGVALCLGCGQPLPQVPERPFSVLWNVPSAHCKSRFGVHLPLNALGIIANRGQHFHGQNMTIFYKNQLGLYPYFGPKGTAHNGGIPQALPLDRHLALAAYQIHHSLRPGFAGPAVLDWEEWCPLWAGNWGRRRAYQAASWAWAQQVFPDLDPQEQLYKAYTGFEQAARALMEDTLRVAQALRPHGLWGFYHYPACGNGWHSMASNYTGRCHAATLARNTQLHWLWAASSALFPSIYLPPRLPPAHHQAFVRHRLEEAFRVALVGHLPVLAYVRLTHRRSGRFLSQDDLVQTIGVSAALGAAGVVLWGDLSLSSSEEECWHLHDYLVDTLGPYGINVTRAAMACSHQRCHGHGRCARRDPGQMEAFLHLWPDGSLGDWKSFSCHCYWGWAGPTCQEPRLGPKEAV

SEQ ID NO: 118 - protein, 510 aa, Macaca fascicularis
  PH20
MGVLKFKHIFFRSFVKSSGVSQIVFTFLLIPCCLTLNFRAPPIIPNVPFLWAWNAPSEFCLGKFNEPLDMSLFTLMGSPRINVTGQGVTIFYVDRLGYYPYIDLTTGVTVHGGIPQKVSLQDHLDKSKQDILFYMPVDNLGMAVIDWEEWRPTWARNWKPKDVYKNRSIELVQQQNVQLSLPQATDKAKQEFEKAGKDFMLETIKLGRSLRPNHLWGYYLFPDCYNHHYRKPGYNGSCFDVEIKRNDDLSWLWNESTALYPSIYLNTQQSVVVATLYVRNRVREAIRVSKIPDAKNPLPVFVYARLVFTDQVLKFLSREELVSTLGETVALGASGIVIWGSLSITRSMKSCLLLDTYMETILNPYIINVTLAAKMCSQVLCQEQGVCIRKDWNSSDYLHLNPDNFDIRLEKGGKFTVHGKPTVEDLEEFSEKFYCSCYTNLSCKEKADVKDTDAVDVCIADGVCIDASLKPPVETEGSPPIFYNTSSSTVSTTMFIVNILFLIISSVASL

SEQ ID NO: 119 - protein, 529 aa, Cavia porcellus
  PH20
MGAFTFKHSFFGSFVECSGVLQTVFIFLLIPCCLADKRAPPLIPNVPLLWVWNAPTEFCIGGTNQPLDMSFFSIVGTPRKNITGQSITLYYVDRLGYYPYIDPHTGAIVHGGLPQLMNLQQHLRKSRQDILFYMPTDSVGLAVIDWEEWRPTWTRNWRPKDIYRNKSIELVKSQHPQYNHSYAVAVAKRDFERTGKAFMLETLKLGKSLRPSSLWGYYLFPDCYNTHFTKPNYDGHCPPIELQRNNDLQWLWNDSTALYPSVYLTSRVRSSQNGALYVRNRVHESIRVSKLMDDKNPLPIYVYIRLVFTDQTTTFLELDDLVHSVGEIVPLGVSGIIIWGSLSLTRSLVSCIGLENYMKGTLLPYLINVTLAAKMCGQVLCKNQGICTRKDWNTNTYLHLNATNFDIELQQNGKFVVHGKPSLEDLQEFSKNFHCSCYTNVACKDRLDVHNVRSVNVCTANNICIDAVLNFPSLDDDDEPPITDDTSQNQDSISDITSSAPPSSHILPKDLSWCLFLLSIFSQHWKYLL

SEQ ID NO: 120 - protein, 512 aa, Rattus norvegicus
  PH20
MGELQFKWLFWRSFAESGGTFQTVLIFLFIPYSLTVDYRATPVLSDTTFVWVWNVPTEACVENVTEPIDLSFFSLIGSPRKTAIGQPVTLFYVDRLGNYPHIDAQQTEHHGGIPQKGDLTTHLVKAKEDVERYIPTDKLGLAIIDWEEWRPTWMRNWTPKDIYRNKSIELVQAADPAINITEATVRAKAQFEGAAKEFMEGTLKLGKHIRPKHLWGFYLFPDCYNNKFQVDNYDGQCPDVEKKRNDDLDWLWKESTGLYPSVYLKKDLKSSRKATLYVRYRVLESIRVSKVSDESNPVPIFVYIRLVFTDHVSEYLLEDDLVNTIGEIVAQGTSGIIIWDAMSLAQRSAGCPILRQYMKTTLNPYIVNVTLAAKMCSQTLCKEKGMCSRKTESSDAYLHLDPSSFSINVTEAGKYEVLGKPEVKDLEYFSEHFKCSCFSKMTCEETSDMRSIQDVNVCMGDNVCIKATLGPNSAFHLLPGKGLLLMTTLAHILHHLPHDIFVFPWKMLVSTP

SEQ ID NO: 121 - protein, 512 aa, Mus musculus
  PH20
MGELRFKHLFWGSFVESGGTFQTVLIFLLIPCSLTVDYRAAPILSNTTFLWIWNVPTERCVGNVNDPIDLSFFSLIGSPRKTATGQPVTLFYVDRLGLYPHIDANQAEHYGGIPQRGDYQAHLRKAKTDIEHYIPDDKLGLAIIDWEEWRPTWLRNWKPKDNYRNKSIELVQSTNPGLSITEATQKAIQQFEEAGRKFMEGTLHLGKFLRPNQLWGYYLFPDCYNNKFQDPKYDGQCPAVEKKRNDNLKWLWKASTGLYPSVYLKKDLKSNRQATLYVRYRVVEAIRVSKVGNASDPVPIFVYIRLVFTDRTSEYLLEDDLVNTIGEIVALGTSGIIIWDAMSLAQRAAGCPILHKYMQTTLNPYIVNVTLAAKMCSQTLCNEKGMCSRRKESSDVYLHLNPSHFDIMLTETGKYEVLGNPRVGDLEYFSEHFKCSCFSRMTCKETSDVKNVQDVNVCVGDNVCIKAKVEPNPAFYLLPGKSLLFMTTLGHVLYHLPQDIFVFPRKTLVSTP

SEQ ID NO: 122 - protein, 331 aa, Vespula vulgaris
  Hyaluronidase A
SERPKRVFNIYWNVPTFMCHQYDLYFDEVTNFNIKRNSKDDFQGDKIAIFYDPGEFPALLSLKDGKYKKRNGGVPQEGNITIHLQKFIENLDKIYPNRNFSGIGVIDFERWRPIFRQNWGNMKIHKNFSIDLVRNEHPTWNKKMIELEASKRFEKYARFFMEETLKLAKKTRKQADWGYYGYPYCFNMSPNNLVPECDVTAMHENDKMSWLFNNQNVLLPSVYVRQELTPDQRIGLVQGRVKEAVRISNNLKHSPKVLSYWWYVYQDETNTFLTETDVKKTFQEIVINGGDGIIIWGSSSDVNSLSKCKRLQDYLLTVLGPIAINVTEAVN

SEQ ID NO: 123 - protein, 340 aa, Vespula vulgaris
  Hyaluronidase B
DRTIWPKKGFSIYWNIPTHFCHNFGVYFKELKQFNIKYNSMNNFRGETISLFYDPGNFPSMVLLKNGTYEIRNEGVPQKGNLTIHLEQFTKELDEIYPKKIAGGIGVIHFHNWRPIFRRNVDNLKINKDISIDLVRKEHPKWDKSMIEKEASNRFETSAKIFMEKTLKLAKEIRKKTEWGYHGYPHCLSGSTDKPSFDCDALSMSENDKMSWLFNNQNVLLPSIYLKNVLKPDEKIHLVQERLKEAIRISKNFKHLPKVLPYWWYTYQDKESIFLTEADVKNTFKEILTNGADGIIIWGVSYELTDRKRCEKLKEYLMKILGPIAFKVTKAVKENTPLNF

SEQ ID NO: 124 - protein, 382 aa, Apis mellifera
  Hyaluronidase
MSRPLVITEGMMIGVLLMLAPINALLLGFVQSTPDNNKTVREFNVYWNVPTFMCHKYGLRFEEVSEKYGILQNWMDKFRGEEIAILYDPGMFPALLKDPNGNVVARNGGVPQLGNLTKHLQVFRDHLINQIPDKSFPGVGVIDFESWRPIFRQNWASLQPYKKLSVEVVRREHPFWDDQRVEQEAKRRFEKYGQLFMEETLKAAKRMRPAANWGYYAYPYCYNLTPNQPSAQCEATTMQENDKMSWLFESEDVLLPSVYLRWNLTSGERVGLVGGRVKEALRIARQMTTSRKKVLPYYWYKYQDRRDTDLSRADLEATLRKITDLGADGFIIWGSSDDINTKAKCLQFREYLNNELGPAVKRIALNNNANDRLTVDVSVDQV

SEQ ID NO: 125 - protein, 331 aa, Dolichovespula maculata
  Hyaluronidase
SERPKRVFNIYWNVPTFMCHQYGLYFDEVTNFNIKHNSKDDFQGDKISIFYDPGEFPALLPLKEGNYKIRNGGVPQEGNITIHLQRFIENLDKTYPNRNFNGIGVIDFERWRPIFRQNWGNMMIHKKFSIDLVRNEHPFWDKKMIELEASKRFEKYARLFMEETLKLAKKTRKQADWGYYGYPYCFNMSPNNLVPDCDATAMLENDKMSWLFNNQNVLLPSVYIRHELTPDQRVGLVQGRVKEAVRISNNLKHSPKVLSYWWYVYQDDTNTFLTETDVKKTFQEIAINGGDGIIIWGSSSDVNSLSKCKRLREYLLTVLGPITVNVTETVN

SEQ ID NO: 126 - protein, 367 aa, Polistes annularis
  Hyaluronidase
YVSLSPDSVFNIITDDISHQILSRSNCERSKRPKRVFSIYWNVPTFMCHQYGMNFDEVTDFNIKHNSKDNFRGETISIYYDPGKFPALMPLKNGNYEERNGGVPQRGNITIHLQQFNEDLDKMTPDKNFGGIGVIDFERWKPIFRQNWGNTEIHKKYSIELVRKEHPKWSESMIEAEATKKFEKYARYFMEETLKLAKKTRKRAKWGYYGFPYCYNVTPNNPGPDCDAKATIENDRLSWMYNNQEILFPSVYVRHEQKPEERVYLVQGRIKEAVRISNNLEHSPSVLAYWWYVYQDKMDIYLSETDVEKTFQEIVTNGGDGIIIWGSSSDVNSLSKCKRLREYLLNTLGPFAVNVTETVNGRSSLNF

SEQ ID NO: 127 - protein, 807 aa, Staphylococcus aureus
  Hyaluronidase
MTYRIKKWQKLSTITLLMAGVITLNGGEFRSVDKHQIAVADTNVQTPDYEKLRNTWLDVNYGYDKYDENNPDMKKKFDATEKEATNLLKEMKTESGRKYLWSGAETLETNSSHMTRTYRNIEKIAEAMRNPKTTLNTDENKKKVKDALEWLHKNAYGKEPDKKVKELSENFTKTTGKNTNLNWWDYEIGTPKSLTNTLILLNDQFSNEEKKKFTAPIKTFAPDSDKILSSVGKAELAKGGNLVDISKVKLLECIIEEDKDMMKKSIDSFNKVFTYVQDSATGKERNGFYKDGSYIDHQDVPYTGAYGVVLLEGISQMMPMIKETPFNDKTQNDTTLKSWIDDGFMPLIYKGEMMDLSRGRAISRENETSHSASATVMKSLLRLSDAMDDSTKAKYKKIVKSSVESDSSYKQNDYLNSYSDIDKMKSLMTDNSISKNGLTQQLKIYNDMDRVTYHNKDLDFAFGLSMTSKNVARYESINGENLKGWHTGAGMSYLYNSDVKHYHDNFWVTADMKRLSGTTTLDNEILKDTDDKKSSKTFVGGTKVDDQHASIGMDFENQDKTLTAKKSYFILNDKIVFLGTGIKSTDSSKNPVTTIENRKANGYTLYTDDKQTTNSDNQENNSVFLESTDTKKNIGYHFLNKPKITVKKESHTGKWKEINKSQKDTQKTDEYYEVTQKHSNSDNKYGYVLYPGLSKDVFKTKKDEVTVVKQEDDFHVVKDNESVWAGVNYSNSTQTFDINNTKVEVKAKGMFILKKKDDNTYECSFYNPESTNSASDIESKISMTGYSITNKNTSTSNESGVHFELTK

SEQ ID NO: 128 - protein, 371 aa, Streptococcus pyogenes
  Bacteriophage H4489A hyaluronidase
MTENIPLRVQFKRMSADEWARSDVILLEGEIGFETDTGFAKFGDGQNTFSKLKYLTGPKGPKGDTGLQGKTGGTGPRGPAGKPGTTDYDQLQNKPDLGAFAQKEETNSKITKLESSKADKSAVYSKAESKIELDKKLSLTGGIVTGQLQFKPNKSGIKPSSSVGGAINIDMSKSEGAAMVMYTNKDTTDGPLMILRSDKDTFDQSAQFVDYSGKTNAVNIVMRQPSAPNFSSALNITSANEGGSAMQIRGVEKALGTLKITHENPNVEAKYDENAAALSIDIVKKQKGGKGTAAQGIYINSTSGTAGKMLRIRNKNEDKFYVGPDGGFHSGANSTVAGNLTVKDPTSGKHAATKDYVDEKIAELKKLILKK

SEQ ID NO: 129 - protein, 1628 aa, Clostridium perfringens
  Hyaluronidase
MNKNIRKIITSTVLAAMTISVLPSNLVVFATDGITENFYEIYPKPQEISYSGGEFQISDEINIVYDDGIDTYTKKRVDEVLEASNLEATVSNEIVPGKTNFLVGINESGGVVDNYFNKNIPHDESFFDEKMDANIVSVKDGVIGVIGEDTDSAFYGVTTLKHVFNQLEEGNKIQSFRADDYAEVAHRGFIEGYYGNPWSNEDRAELMKFGGDYKLNQYVFAPKDDPYHNSKWRDLYPEEKLSEIKKLAQVGNETKNRYVYALHPFMNNPVRFDTEENYQNDLGVIKAKFTQLLENDVRQFAILADDASAPAQGASMYVKLLTDLTRWLEEQQSTYPDLKTDLMFCPSDYYGNGSSAQLKELNKAEDNVSIVMTGGRIWGEVDENFANNFMNNISTEGHPGRAPFFWINWPCSDNSKQHLIMGGNDTFLHPGVDPSKIDGIVLNPMQQAEANKSALFAIADYAWNIWDNKEEADENWNDSFKYMDHGTAEETNSSLALREISKHMINQNMDGRVRPLQESVELAPKLEAFKQKYDSGASIKEDALELIAEFTNLQKAADYYKNNPGNERTRDQIIYWLNCWEDTMDAAIGYLKSAIAIEEGDDEAAWANYSEAQGAFEKSKTYGFHYVDHTEYAEVGVQHIVPFIKSMGQNLSVVIGSIVDPNRIIATYISNRQDAPTGNPDNIFDNNASTELVYKNPNRIDVGTYVGVKYSNPITLNNVEFLMGANSNPNDTMQKAKIQYTVDGREWIDLEEGVEYTMPGAIKVENLDLKVRGVRLIATEARENTWLGVRDINVNKKEDSNSGVEFNPSLIRSESWQVYEGNEANLLDGDDNTGVWYKTLNGDTSLAGEFIGLDLGKEIKLDGIRFVIGKNGGGSSDKWNKFKLEYSLDNESWTTIKEYDKTGAPAGKDVIEESFETPISAKYIRLTNMENINKWLTFSEFAIISDELENAGNKENVYTNTELDLLSLAKEDVTKLIPTDDISLNHGEYIGVKLNRIKDLSNINLEISNDTGLKLQSSMNGVEWTEITDKNTLEDGRYVRLINTSNEAVNFNLTKFEVNSNEVYEPSLVDAYVGDDGAKKAVDGDLKTRVKFLGAPSTGDTIVYDLGQEILVDNLKYVVLDTEVDHVRDGKIQLSLDGETWTDAITIGDGVENGVDDMFSTPLKNGYKHGNQSGGIVPIDSAYVEGDNLNQKARYVRILFTAPYRHRWTVINELMINNGEYISTVNDPTYISNPIEERGFAPSNLRDGNLTTSYKPNTNNGEISEGSITYRLSEKTDVRKVTIVQSGSSISNAKVMARVGDGSENVTDQWVQLGTLSNSLNEFINRDYNNIYEIKIEWTDVAPNIYEIITLNQEFEFPVNDSLKAKYDELINLSGDEYTLSSFETLKEALNEAKSILDDSNSSQKKIDKALEKLNKAEERLDLRATDFEDFNKVLTLGNSLVEEEYTAESWALFSEVLEAANEANKNKADYTQDQINQIVIDLDASIKALVKETPEVDKTNLGELINQGKSLLDESVEGFNVGEYHKGAKDGLTVEINKAEEVFNKEDATEEEINLAKESLEGAIARFNSLLIEESTGDFNGNGKIDIGDLAMVSKNIGSTTNTSLDLNKDGSIDEYEISFINHRILN

SEQ ID NO: 130 - protein, 22 aa, Artificial Sequence
  pelB leader sequence
MKYLLPTAAAGLLLLAAQPAMA

SEQ ID NO: 131 - DNA, 5360 bp, Artificial Sequence
  pET26B vector
atccggatatagttcctcctttcagcaaaaaacccctcaagacccgtttagaggccccaaggggttatgctagttattgctcagcggtggcagcagccaactcagcttcctttcgggctttgttagcagccggatctcagtggtggtggtggtggtgctcgagtgcggccgcaagcttgtcgacggagctcgaattcggatccgaattaattccgatatccatggccatcgccggctgggcagcgaggagcagcagaccagcagcagcggtcggcagcaggtatttcatatgtatatctccttcttaaagttaaacaaaattatttctagaggggaattgttatccgctcacaattcccctatagtgagtcgtattaatttcgcgggatcgagatctcgatcctctacgccggacgcatcgtggccggcatcaccggcgccacaggtgcggttgctggcgcctatatcgccgacatcaccgatggggaagatcgggctcgccacttcgggctcatgagcgcttgtttcggcgtgggtatggtggcaggccccgtggccgggggactgttgggcgccatctccttgcatgcaccattccttgcggcggcggtgctcaacggcctcaacctactactgggctgcttcctaatgcaggagtcgcataagggagagcgtcgagatcccggacaccatcgaatggcgcaaaacctttcgcggtatggcatgatagcgcccggaagagagtcaattcagggtggtgaatgtgaaaccagtaacgttatacgatgtcgcagagtatgccggtgtctcttatcagaccgtttcccgcgtggtgaaccaggccagccacgtttctgcgaaaacgcgggaaaaagtggaagcggcgatggcggagctgaattacattcccaaccgcgtggcacaacaactggcgggcaaacagtcgttgctgattggcgttgccacctccagtctggccctgcacgcgccgtcgcaaattgtcgcggcgattaaatctcgcgccgatcaactgggtgccagcgtggtggtgtcgatggtagaacgaagcggcgtcgaagcctgtaaagcggcggtgcacaatcttctcgcgcaacgcgtcagtgggctgatcattaactatccgctggatgaccaggatgccattgctgtggaagctgcctgcactaatgttccggcgttatttcttgatgtctctgaccagacacccatcaacagtattattttctcccatgaagacggtacgcgactgggcgtggagcatctggtcgcattgggtcaccagcaaatcgcgctgttagcgggcccattaagttctgtctcggcgcgtctgcgtctggctggctggcataaatatctcactcgcaatcaaattcagccgatagcggaacgggaaggcgactggagtgccatgtccggttttcaacaaaccatgcaaatgctgaatgagggcatcgttcccactgcgatgctggttgccaacgatcagatggcgctgggcgcaatgcgcgccattaccgagtccgggctgcgcgttggtgcggatatctcggtagtgggatacgacgataccgaagacagctcatgttatatcccgccgttaaccaccatcaaacaggattttcgcctgctggggcaaaccagcgtggaccgcttgctgcaactctctcagggccaggcggtgaagggcaatcagctgttgcccgtctcactggtgaaaagaaaaaccaccctggcgcccaatacgcaaaccgcctctccccgcgcgttggccgattcattaatgcagctggcacgacaggtttcccgactggaaagcgggcagtgagcgcaacgcaattaatgtaagttagctcactcattaggcaccgggatctcgaccgatgcccttgagagccttcaacccagtcagctccttccggtgggcgcggggcatgactatcgtcgccgcacttatgactgtcttctttatcatgcaactcgtaggacaggtgccggcagcgctctgggtcattttcggcgaggaccgctttcgctggagcgcgacgatgatcggcctgtcgcttgcggtattcggaatcttgcacgccctcgctcaagccttcgtcactggtcccgccaccaaacgtttcggcgagaagcaggccattatcgccggcatggcggccccacgggtgcgcatgatcgtgctcctgtcgttgaggacccggctaggctggcggggttgccttactggttagcagaatgaatcaccgatacgcgagcgaacgtgaagcgactgctgctgcaaaacgtctgcgacctgagcaacaacatgaatggtcttcggtttccgtgtttcgtaaagtctggaaacgcggaagtcagcgccctgcaccattatgttccggatctgcatcgcaggatgctgctggctaccctgtggaacacctacatctgtattaacgaagcgctggcattgaccctgagtgatttttctctggtcccgccgcatccataccgccagttgtttaccctcacaacgttccagtaaccgggcatgttcatcatcagtaacccgtatcgtgagcatcctctctcgtttcatcggtatcattacccccatgaacagaaatcccccttacacggaggcatcagtgaccaaacaggaaaaaaccgcccttaacatggcccgctttatcagaagccagacattaacgcttctggagaaactcaacgagctggacgcggatgaacaggcagacatctgtgaatcgcttcacgaccacgctgatgagctttaccgcagctgcctcgcgcgtttcggtgatgacggtgaaaacctctgacacatgcagctcccggagacggtcacagcttgtctgtaagcggatgccgggagcagacaagcccgtcagggcgcgtcagcgggtgttggcgggtgtcggggcgcagccatgacccagtcacgtagcgatagcggagtgtatactggcttaactatgcggcatcagagcagattgtactgagagtgcaccatatatgcggtgtgaaataccgcacagatgcgtaaggagaaaataccgcatcaggcgctcttccgcttcctcgctcactgactcgctgcgctcggtcgttcggctgcggcgagcggtatcagctcactcaaaggcggtaatacggttatccacagaatcaggggataacgcaggaaagaacatgtgagcaaaaggccagcaaaaggccaggaaccgtaaaaaggccgcgttgctggcgtttttccataggctccgcccccctgacgagcatcacaaaaatcgacgctcaagtcagaggtggcgaaacccgacaggactataaagataccaggcgtttccccctggaagctccctcgtgcgctctcctgttccgaccctgccgcttaccggatacctgtccgcctttctcccttcgggaagcgtggcgctttctcatagctcacgctgtaggtatctcagttcggtgtaggtcgttcgctccaagctgggctgtgtgcacgaaccccccgttcagcccgaccgctgcgccttatccggtaactatcgtcttgagtccaacccggtaagacacgacttatcgccactggcagcagccactggtaacaggattagcagagcgaggtatgtaggcggtgctacagagttcttgaagtggtggcctaactacggctacactagaaggacagtatttggtatctgcgctctgctgaagccagttaccttcggaaaaagagttggtagctcttgatccggcaaacaaaccaccgctggtagcggtggtttttttgtttgcaagcagcagattacgcgcagaaaaaaaggatctcaagaagatcctttgatcttttctacggggtctgacgctcagtggaacgaaaactcacgttaagggattttggtcatgaacaataaaactgtctgcttacataaacagtaatacaaggggtgttatgagccatattcaacgggaaacgtcttgctctaggccgcgattaaattccaacatggatgctgatttatatgggtataaatgggctcgcgataatgtcgggcaatcaggtgcgacaatctatcgattgtatgggaagcccgatgcgccagagttgtttctgaaacatggcaaaggtagcgttgccaatgatgttacagatgagatggtcagactaaactggctgacggaatttatgcctcttccgaccatcaagcattttatccgtactcctgatgatgcatggttactcaccactgcgatccccgggaaaacagcattccaggtattagaagaatatcctgattcaggtgaaaatattgttgatgcgctggcagtgttcctgcgccggttgcattcgattcctgtttgtaattgtccttttaacagcgatcgcgtatttcgtctcgctcaggcgcaatcacgaatgaataacggtttggttgatgcgagtgattttgatgacgagcgtaatggctggcctgttgaacaagtctggaaagaaatgcataaacttttgccattctcaccggattcagtcgtcactcatggtgatttctcacttgataaccttatttttgacgaggggaaattaataggttgtattgatgttggacgagtcggaatcgcagaccgataccaggatcttgccatcctatggaactgcctcggtgagttttctccttcattacagaaacggctttttcaaaaatatggtattgataatcctgatatgaataaattgcagtttcatttgatgctcgatgagtttttctaagaattaattcatgagcggatacatatttgaatgtatttagaaaaataaacaaataggggttccgcgcacatttccccgaaaagtgccacctgaaattgtaaacgttaatattttgttaaaattcgcgttaaatttttgttaaatcagctcattttttaaccaataggccgaaatcggcaaaatcccttataaatcaaaagaatagaccgagatagggttgagtgttgttccagtttggaacaagagtccactattaaagaacgtggactccaacgtcaaagggcgaaaaaccgtctatcagggcgatggcccactacgtgaaccatcaccctaatcaagttttttggggtcgaggtgccgtaaagcactaaatcggaaccctaaagggagcccccgatttagagcttgacggggaaagccggcgaacgtggcgagaaaggaagggaagaaagcgaaaggagcgggcgctagggcgctggcaagtgtagcggtcacgctgcgcgtaaccaccacacccgccgcgcttaatgcgccgctacagggcgcgtcccattcgcca

SEQ ID NO: 132 - protein, 367 aa, Homo sapiens
  Mature MMP-8
LTPGNPKWERTNLTYRIRNYTPQLSEAEVERAIKDAFELWSVASPLIFTRISQGEADINIAFYQRDHGDNSPFDGPNGILAHAFQPGQGIGGDAHFDAEETWTNTSANYNLFLVAAHEFGHSLGLAHSSDPGALMYPNYAFRETSNYSLPQDDIDGIQAIYGLSSNPIQPTGPSTPKPCDPSLTFDAITTLRGEILFFKDRYFWRRHPQLQRVEMNFISLFWPSLPTGIQAAYEDFDRDLIFLFKGNQYWALSGYDILQGYPKDISNYGFPSSVQAIDAAVFYRSKTYFFVNDQFWRYDNQRQFMEPGYPKSISGAFPGIESKVDAVFQQEHFFHVFSGPRYYAFDLIAQRVTRVARGNKWLNCRYG

SEQ ID NO: 133 - protein, 368 aa, Homo sapiens
  Mature MMP-13
YNVFPRTLKWSKMNLTYRIVNYTPDMTHSEVEKAFKKAFKVWSDVTPLNFTRLHDGIADIMISFGIKEHGDFYPFDGPSGLLAHAFPPGPNYGGDAHFDDDETWTSSSKGYNLFLVAAHEFGHSLGLDHSKDPGALMFPIYTYTGKSHFMLPDDDVQGIQSLYGPGDEDPNPKHPKTPDKCDPSLSLDAITSLRGETMIFKDRFFWRLHPQQVDAELFLTKSFWPELPNRIDAAYEHPSHDLIFIFRGRKFWALNGYDILEGYPKKISELGLPKEVKKISAAVHFEDTGKTLLFSGNQVWRYDDTNHIMDKDYPRLIEEDFPGIGDKVDAVYEKNGYIYFFNGPIQFEYSIWSNRIVRVMPANSILWC

SEQ ID NO: 134 - protein, 368 aa, Xenopus laevis
  Mature MMP-18
YSTVAKSSAWQKKDLTYRILNFTPDLPQADVETAIQRAFKVWSDVTPLTFTRIYNEVSDIEISFTAGDHKDNSPFDGSGGILAHAFQPGNGIGGDAHFDEDETWTKTSEIYNLFLVAAHEFGHSLGLSHSTDQGALMYPTYSNTDPKTFQLPQDDINAIQYLYGKSSNPVQPTGPSTPSRCDPNVVFNAVTTMRGELIFFVKRFLWRKHPQASEAELMFVQAFWPSLPTNIDAAYENPITEQILVFKGSKYTALDGFDVVQGYPRNIYSLGFPKTVKRIDAAVHIEQLGKTYFFAAKKYWSYDEDKKQMDKGFPKQISNDFPGIPDKIDAAFYYRGRLYFFIGRSQFEYNINSKRIVQVLRSNSWLGC

SEQ ID NO: 135 - protein, 551 aa, Homo sapiens
  Mature MMP-2
YNFFPRKPKWDKNQITYRIIGYTPDLDPETVDDAFARAFQVWSDVTPLRFSRIHDGEADIMINFGRWEHGDGYPFDGKDGLLAHAFAPGTGVGGDSHFDDDELWTLGEGQVVRVKYGNADGEYCKFPFLFNGKEYNSCTDTGRSDGFLWCSTTYNFEKDGKYGFCPHEALFTMGGNAEGQPCKFPFRFQGTSYDSCTTEGRTDGYRWCGTTEDYDRDKKYGFCPETAMSTVGGNSEGAPCVFPFTFLGNKYESCTSAGRSDGKMWCATTANYDDDRKWGFCPDQGYSLFLVAAHEFGHAMGLEHSQDPGALMAPIYTYTKNFRLSQDDIKGIQELYGASPDIDLGTGPTPTLGPVTPEICKQDIVFDGIAQIRGEIFFFKDRFIWRTVTPRDKPMGPLLVATFWPELPEKIDAVYEAPQEEKAVFFAGNEYWIYSASTLERGYPKPLTSLGLPPDVQRVDAAFNWSKNKKTYIFAGDKFWRYNEVKKKMDPGFPKLIADAWNAIPDNLDAVVDLQGGGHSYFFKGAYYLKLENQSLKSVKFGSIKSDWLGC

SEQ ID NO: 136 - protein, 614 aa, Homo sapiens
  Mature MMP-9
MRTPRCGVPDLGRFQTFEGDLKWHHHNITYWIQNYSEDLPRAVIDDAFARAFALWSAVTPLTFTRVYSRDADIVIQFGVAEHGDGYPFDGKDGLLAHAFPPGPGIQGDAHFDDDELWSLGKGVVVPTRFGNADGAACHFPFIFEGRSYSACTTDGRSDGLPWCSTTANYDTDDRFGFCPSERLYTRDGNADGKPCQFPFIFQGQSYSACTTDGRSDGYRWCATTANYDRDKLFGFCPTRADSTVMGGNSAGELCVFPFTFLGKEYSTCTSEGRGDGRLWCATTSNFDSDKKWGFCPDQGYSLFLVAAHEFGHALGLDHSSVPEALMYPMYRFTEGPPLHKDDVNGIRHLYGPRPEPEPRPPTTTTPQPTAPPTVCPTGPPTVHPSERPTAGPTGPPSAGPTGPPTAGPSTATTVPLSPVDDACNVNIFDAIAEIGNQLYLFKDGKYWRFSEGRGSRPQGPFLIADKWPALPRKLDSVFEEPLSKKLFFFSGRQVWVYTGASVLGPRRLDKLGLGADVAQVTGALRSGRGKMLLFSGRRLWRFDVKAQMVDPRSASEVDRMFPGVPLDTHDVFQYREKAYFCQDRFYWRVSSRSELNQVDQVGYVTYDILQCPED

SEQ ID NO: 137 - protein, 378 aa, Homo sapiens
  Mature MMP-3
FRTFPGIPKWRKTHLTYRIVNYTPDLPKDAVDSAVEKALKVWEEVTPLTFSRLYEGEADIMISFAVREHGDFYPFDGPGNVLAHAYAPGPGINGDAHFDDDEQWTKDTTGTNLFLVAAHEIGHSLGLFHSANTEALMYPLYHSLTDLTRFRLSQDDINGIQSLYGPPPDSPETPLVPTEPVPPEPGTPANCDPALSFDAVSTLRGEILIFKDRHFWRKSLRKLEPELHLISSFWPSLPSGVDAAYEVTSKDLVFIFKGNQFWAIRGNEVRAGYPRGIHTLGFPPTVRKIDAAISDKEKNKTYFFVEDKYWRFDEKRNSMEPGFPKQIAEDFPGIDSKIDAVFEEFGFFYFFTGSSQLEFDPNAKKVTHTLKSNSWLNC

SEQ ID NO: 138 - protein, 378 aa, Homo sapiens
  Mature MMP-10
FSSFPGMPKWRKTHLTYRIVNYTPDLPRDAVDSAIEKALKVWEEVTPLTFSRLYEGEADIMISFAVKEHGDFYSFDGPGHSLAHAYPPGPGLYGDIHFDDDEKWTEDASGTNLFLVAAHELGHSLGLFHSANTEALMYPLYNSFTELAQFRLSQDDVNGIQSLYGPPPASTEEPLVPTKSVPSGSEMPAKCDPALSFDAISTLRGEYLFFKDRYFWRRSHWNPEPEFHLISAFWPSLPSYLDAAYEVNSRDTVFIFKGNEFWAIRGNEVQAGYPRGIHTLGFPPTIRKIDAAVSDKEKKKTYFFAADKYWRFDENSQSMEQGFPRLIADDFPGVEPKVDAVLQAFGFFYFFSGSSQFEFDPNARMVTHILKSNSWLHC

SEQ ID NO: 139 - protein, 391 aa, Homo sapiens
  Mature MMP-11
FVLSGGRWEKTDLTYRILRFPWQLVQEQVRQTMAEALKVWSDVTPLTFTEVHEGRADIMIDFARYWHGDDLPFDGPGGILAHAFFPKTHREGDVHFDYDETWTIGDDQGTDLLQVAAHEFGHVLGLQHTTAAKALMSAFYTFRYPLSLSPDDCRGVQHLYGQPWPTVTSRTPALGPQAGIDTNEIAPLEPDAPPDACEASFDAVSTIRGELFFFKAGFVWRLRGGQLQPGYPALASRHWQGLPSPVDAAFEDAQGHIWFFQGAQYWVYDGEKPVLGPAPLTELGLVRFPVHAALVWGPEKNKIYFFRGRDYWRFHPSTRRVDSPVPRRATDWRGVPSEIDAAFQDADGYAYFLRGRLYWKFDPVKVKALEGFPRLVGPDFFGCAEPANTFL

SEQ ID NO: 140 - protein, 173 aa, Homo sapiens
  Mature MMP-7
YSLFPNSPKWTSKVVTYRIVSYTRDLPHITVDRLVSKALNMWGKEIPLHFRKVVWGTADIMIGFARGAHGDSYPFDGPGNTLAHAFAPGTGLGGDAHFDEDERWTDGSSLGINFLYAATHELGHSLGMGHSSDPNAVMYPTYGNGDPQNFKLSQDDIKGIQKLYGKRSNSRKK

SEQ ID NO: 141 - protein, 172 aa, Homo sapiens
  Mature MMP-26
TSISPGRCKWNKHTLTYRIINYPHDMKPSAVKDSIYNAVSIWSNVTPLIFQQVQNGDADIKVSFWQWAHEDGWPFDGPGGILGHAFLPNSGNPGVVHFDKNEHWSASDTGYNLFLVATHEIGHSLGLQHSGNQSSIMYPTYWYHDPRTFQLSADDIQRIQHLYGEKCSSDIP

SEQ ID NO: 142 - protein, 365 aa, Homo sapiens
  Mature MMP-12
GPVWRKHYITYRINNYTPDMNREDVDYAIRKAFQVWSNVTPLKFSKINTGMADILVVFARGAHGDFHAFDGKGGILAHAFGPGSGIGGDAHFDEDEFWTTHSGGTNLFLTAVHEIGHSLGLGHSSDPKAVMFPTYKYVDINTFRLSADDIRGIQSLYGDPKENQRLPNPDNSEPALCDPNLSFDAVTTVGNKIFFFKDRFFWLKVSERPKTSVNLISSLWPTLPSGIEAAYEIEARNQVFLFKDDKYWLISNLRPEPNYPKSIHSFGFPNFVKKIDAAVFNPRFYRTYFFVDNQYWRYDERRQMMDPGYPKLITKNFQGIGPKIDAVFYSKNKYYYFFQGSNQFEYDFLLQRITKTLKSNSWFGC

SEQ ID NO: 143 - protein, 471 aa, Homo sapiens
  Mature MMP-14
YAIQGLKWQHNEITFCIQNYTPKVGEYATYEAIRKAFRVWESATPLRFREVPYAYIREGHEKQADIMIFFAEGFHGDSTPFDGEGGFLAHAYFPGPNIGGDTHFDSAEPWTVRNEDLNGNDIFLVAVHELGHALGLEHSSDPSAIMAPFYQWMDTENFVLPDDDRRGIQQLYGGESGFPTKMPPQPRTTSRPSVPDKPKNPTYGPNICDGNFDTVAMLRGEMFVFKERWFWRVRNNQVMDGYPMPIGQFWRGLPASINTAYERKDGKFVFFKGDKHWVFDEASLEPGYPKHIKELGRGLPTDKIDAALFWMPNGKTYFFRGNKYYRFNEELRAVDSEYPKNIKVWEGIPESPRGSFMGSDEVFTYFYKGNKYWKFNNQKLKVEPGYPKSALRDWMGCPSGGRPDEGTEEETEVIIIEVDEEGGGAVSAAAVVLPVLLLLLVLAVGLAVFFFRRHGTPRRLLYCQRSLLDKV

SEQ ID NO: 144 - protein, 529 aa, Homo sapiens
  Mature MMP-15
YALTGRKWNNHHLTFSIQNYTEKLGWYHSMEAVRRAFRVWEQATPLVFQEVPYEDIRLRRQKEADIMVLFASGFHGDSSPFDGTGGFLAHAYFPGPGLGGDTHFDADEPWTFSSTDLHGNNLFLVAVHELGHALGLEHSSNPNAIMAPFYQWKDVDNFKLPEDDLRGIQQLYGTPDGQPQPTQPLPTVTPRRPGRPDHRPPRPPQPPPPGGKPERPPKPGPPVQPRATERPDQYGPNICDGDFDTVAMLRGEMFVFKGRWFWRVRHNRVLDNYPMPIGHFWRGLPGDISAAYERQDGRFVFFKGDRYWLFREANLEPGYPQPLTSYGLGIPYDRIDTAIWWEPTGHTFFFQEDRYWRFNEETQRGDPGYPKPISVWQGIPASPKGAFLSNDAAYTYFYKGTKYWKFDNERLRMEPGYPKSILRDFMGCQEHVEPGPRWPDVARPPFNPHGGAEPGADSAEGDVGDGDGDFGAGVNKDGGSRVVVQMEEVARTVNVVMVLVPLLLLLCVLGLTYALVQMQRKGAPRVLLY

SEQ ID NO: 145 - protein, 481 aa, Homo sapiens
  Mature MMP-16
YALTGQKWQHKHITYSIKNVTPKVGDPETRKAIRRAFDVWQNVTPLTFEEVPYSELENGKRDVDITIIFASGFHGDSSPFDGEGGFLAHAYFPGPGIGGDTHFDSDEPWTLGNPNHDGNDLFLVAVHELGHALGLEHSNDPTAIMAPFYQYMETDNFKLPNDDLQGIQKIYGPPDKIPPPTRPLPTVPPHRSIPPADPRKNDRPKPPRPPTGRPSYPGAKPNICDGNFNTLAILRREMFVFKDQWFWRVRNNRVMDGYPMQITYFWRGLPPSIDAVYENSDGNFVFFKGNKYWVFKDTTLQPGYPHDLITLGSGIPPHGIDSAIWWEDVGKTYFFKGDRYWRYSEEMKTMDPGYPKPITVWKGIPESPQGAFVHKENGFTYFYKGKEYWKFNNQILKVEPGYPRSILKDFMGCDGPTDRVKEGHSPPDDVDIVIKLDNTASTVKAIAIVIPCILALCLLVLVYTVFQFKRKGTPRHILYCK

SEQ ID NO: 146 - protein, 478 aa, Homo sapiens
  Mature MMP-17
QAPAPTKWNKRNLSWRVRTFPRDSPLGHDTVRALMYYALKVWSDIAPLNFHEVAGSTADIQIDFSKADHNDGYPFDGPGGTVAHAFFPGHHHTAGDTHFDDDEAWTFRSSDAHGMDLFAVAVHEFGHAIGLSHVAAAHSIMRPYYQGPVGDPLRYGLPYEDKVRVWQLYGVRESVSPTAQPEEPPLLPEPPDNRSSAPPRKDVPHRCSTHFDAVAQIRGEAFFFKGKYFWRLTRDRHLVSLQPAQMHRFWRGLPLHLDSVDAVYERTSDHKIVFFKGDRYWVFKDNNVEEGYPRPVSDFSLPPGGIDAAFSWAHNDRTYFFKDQLYWRYDDHTRHMDPGYPAQSPLWRGVPSTLDDAMRWSDGASYFFRGQEYWKVLDGELEVAPGYPQSTARDWLVCGDSQADGSVAAGVDAAEGPRAPPGQHDQSRSEDGYEVCSCTSGASSPPGAPGPLVAATMLLLLPPLSPGALWTAAQALTL

SEQ ID NO: 147 - protein, 490 aa, Homo sapiens
  Mature MMP-24
YALTGQKWRQKHITYSIHNYTPKVGELDTRKAIRQAFDVWQKVTPLTFEEVPYHEIKSDRKEADIMIFFASGFHGDSSPFDGEGGFLAHAYFPGPGIGGDTHFDSDEPWTLGNANHDGNDLFLVAVHELGHALGLEHSSDPSAIMAPFYQYMETHNFKLPQDDLQGIQKIYGPPAEPLEPTRPLPTLPVRRIHSPSERKHERQPRPPRPPLGDRPSTPGTKPNICDGNFNTVALFRGEMFVFKDRWFWRLRNNRVQEGYPMQIEQFWKGLPARIDAAYERADGRFVFFKGDKYWVFKEVTVEPGYPHSLGELGSCLPREGIDTALRWEPVGKTYFFKGERYWRYSEERRATDPGYPKPITVWKGIPQAPQGAFISKEGYYTYFYKGRDYWKFDNQKLSVEPGYPRNILRDWMGCNQKEVERRKERRLPQDDVDIMVTINDVPGSVNAVAVVIPCILSLCILVLVYTIFQFKNKTGPQPVTYYKRPVQEWV

SEQ ID NO: 148 - protein, 455 aa, Homo sapiens
  Mature MMP-25
YALSGSVWKKRTLTWRVRSFPQSSQLSQETVRVLMSYALMAWGMESGLTFHEVDSPQGQEPDILIDFARAFHQDSYPFDGLGGTLAHAFFPGEHPISGDTHFDDEETWTFGSKDGEGTDLFAVAVHEFGHALGLGHSSAPNSIMRPFYQGPVGDPDKYRLSQDDRDGLQQLYGKAPQTPYDKPTRKPLAPPPQPPASPTHSPSFPIPDRCEGNFDAIANIRGETFFFKGPWFWRLQPSGQLVSPRPARLHRFWEGLPAQVRVVQAAYARHRDGRILLFSGPQFWVFQDRQLEGGARPLTELGLPPGEEVDAVFSWPQNGKTYLVRGRQYWRYDEAAARPDPGYPRDLSLWEGAPPSPDDVTVSNAGDTYFFKGAHYWRFPKNSIKTEPDAPQPMGPNWLDCPAPSSGPRAPRPPKATPVSETCDCQCELNQAAGRWPAPIPLLLLPLLVGGVASR

SEQ ID NO: 149 - protein, 373 aa, Homo sapiens
  MMP-20
YRLFPGEPKWKKNTLTYRISKYTPSMSSVEVDKAVEMALQAWSSAVPLSFVRINSGEADIMISFENGDHGDSYPFDGPRGTLAHAFAPGEGLGGDTHFDNAEKWTMGTNGFNLFTVAAHEFGHALGLAHSTDPSALMYPTYKYKNPYGFHLPKDDVKGIQALYGPRKVFLGKPTLPHAPHHKPSIPDLCDSSSSFDAVTMLGKELLLFKDRIFWRRQVHLRTGIRPSTITSSFPQLMSNVDAAYEVAERGTAYFFKGPHYWITRGFQMQGPPRTIYDFGFPRHVQQIDAAVYLREPQKTLFFVGDEYYSYDERKRKMEKDYPKNTEEEFSGVNGQIDAAVELNGYIYFFSGPKTYKYDTEKEDVVSVVKSSSW

SEQ ID NO: 150 - protein, 411 aa, Homo sapiens
  Mature MMP-19
YLLLGRWRKKHLTFRILNLPSTLPPHTARAALRQAFQDWSNVAPLTFQEVQAGAADIRLSFHGRQSSYCSNTFDGPGRVLAHADIPELGSVHFDEDEFWTEGTYRGVNLRIIAAHEVGHALGLGHSRYSQALMAPVYEGYRPHFKLHPDDVAGIQALYGKKSPVIRDEEEEETELPTVPPVPTEPSPMPDPCSSELDAMMLGPRGKTYAFKGDYVWTVSDSGPGPLFRVSALWEGLPGNLDAAVYSPRTQWIHFFKGDKVWRYINFKMSPGFPKKLNRVEPNLDAALYWPLNQKVFLFKGSGYWQWDELARTDFSSYPKPIKGLFTGVPNQPSAAMSWQDGRVYFFKGKVYWRLNQQLRVEKGYPRNISHNWMHCRPRTIDTTPSGGNTTPSGTGITLDTTLSATETTFEY

SEQ ID NO: 151 - protein, 425 aa, Homo sapiens
  Mature MMP-21
SPRAPLSLSRRGWQPRGYPDGGAAQAFSKRTLSWRLLGEALSSQLSAADQRRIVALAFRMWSEVTPLDFREDLAAPGAAVDIKLGFGRGRHLGCPRAFDGSGQEFAHAWRLGDIHFDDDEHFTPPTSDTGISLLKVAVHEIGHVLGLPHTYRTGSIMQPNYIPQEPAFELDWSDRKAIQKLYGSCEGSFDTAFDWIRKERNQYGEVMVRFSTYFFRNSWYWLYENRNNRTRYGDPIQILTGWPGIPTHNIDAFVHIWTWKRDERYFFQGNQYWRYDSDKDQALTEDEQGKSYPKLISEGFPGIPSPLDTAFYDRRQKLIYFFKESLVFAFDVNRNRVLNSYPKRITEVFPAVIPQNHPFRNIDSAYYSYAYNSIFFFKGNAYWKVVNDKDKQQNSWLPANGLFPKKFISEKWFDVCDVHISTLNM

SEQ ID NO: 152 - protein, 312 aa, Homo sapiens
  Mature MMP-23
YTLTPARLRWDHFNLTYRILSFPRNLLSPRETRRALAAAFRMWSDVSPFSFREVAPEQPSDLRIGFYPINHTDCLVSALHHCFDGPTGELAHAFFPPHGGIHFDDSEYWVLGPTRYSWKKGVWLTDLVHVAAHEIGHALGLMHSQHGRALMHLNATLRGWKALSQDELWGLHRLYGCLDRLFVCASWARRGFCDARRRLMKRLCPSSCDFCYEFPFPTVATTPPPPRTKTRLVPEGRNVTFRCGQKILHKKGKVYWYKDQEPLEFSYPGYLALGEAHLSIIANAVNEGTYTCVVRRQQRVLTTYSWRVRVRG

SEQ ID NO: 153 - protein, 415 aa, Homo sapiens
  Mature MMP-27
YGYTLPGWRKYNLTYRIINYTPDMARAAVDEAIQEGLEVWSKVTPLKFTKISKGIADIMIAFRTRVHGRCPRYFDGPLGVLGHAFPPGPGLGGDTHFDEDENWTKDGAGFNLFLVAAHEFGHALGLSHSNDQTALMFPNYVSLDPRKYPLSQDDINGIQSIYGGLPKEPAKPKEPTIPHACDPDLTFDAITTFRREVMFFKGRHLWRIYYDITDVEFELIASFWPSLPADLQAAYENPRDKILVFKDENFWMIRGYAVLPDYPKSIHTLGFPGRVKKIDAAVCDKTTRKTYFFVGIWCWRFDEMTQTMDKGFPQRVVKHFPGISIRVDAAFQYKGFFFFSRGSKQFEYDIKTKNITRIMRTNTWFQCKEPKNSSFGFDINKEKAHSGGIKILYHKSLSLFIFGIVHLLKNTSIYQ

SEQ ID NO: 154 - protein, 398 aa, Homo sapiens
  Mature MMP-28
FAKQGNKWYKQHLSYRLVNWPEHLPEPAVRGAVRAAFQLWSNVSALEFWEAPATGPADIRLTFFQGDHNDGLGNAFDGPGGALAHAFLPRRGEAHFDQDERWSLSRRRGRNLFVVLAHEIGHTLGLTHSPAPRALMAPYYKRLGRDALLSWDDVLAVQSLYGKPLGGSVAVQLPGKLFTDFETWDSYSPQGRRPETQGPKYCHSSFDAITVDRQQQLYIFKGSHFWEVAADGNVSEPRPLQERWVGLPPNIEAAAVSLNDGDFYFFKGGRCWRFRGPKPVWGLPQLCRAGGLPRHPDAALFFPPLRRLILFKGARYYVLARGGLQVEPYYPRSLQDWGGIPEEVSGALPRPDGSIIFFRDDRYWRLDQAKLQATTSGRWATELPWMGCWHANSGSALF

SEQ ID NO: 155 - protein, 450 aa, Artificial Sequence
  MMP-1 mutant G159V/S208K
FPATLETQEQDVDLVQKYLEKYYNLKNDGRQVEKRRNSGPVVEKLKQMQEFFGLKVTGKPDAETLKVMKQPRCGVPDVAQFVLTEGNPRWEQTHLTYRIENYTPDLPRADVDHAIEKAFQLWSNVTPLTFTKVSEGQADIMISFVRGDHRDNSPFDGPVGNLAHAFQPGPGIGGDAHFDEDERWTNNFREYNLHRVAAHELGHSLGLKHSTDIGALMYPSYTFSGDVQLAQDDIDGIQAIYGRSQNPVQPIGPQTPKACDSKLTFDAITTIRGEVMFFKDRFYMRTNPFYPEVELNFISVFWPQLPNGLEAAYEFADRDEVRFFKGNKYWAVQGQNVLHGYPKDIYSSFGFPRTVKHIDAALSEENTGKTYFFVANKYWRYDEYKRSMDPGYPKMIAHDFPGIGHKVDAVFMKDGFFYFFHGTRQYKFDPKTKRILTLQKANSWFNCRKN

SEQ ID NO: 156 - protein, 450 aa, Artificial Sequence
  MMP-1 mutant D156T/D179N
FPATLETQEQDVDLVQKYLEKYYNLKNDGRQVEKRRNSGPVVEKLKQMQEFFGLKVTGKPDAETLKVMKQPRCGVPDVAQFVLTEGNPRWEQTHLTYRIENYTPDLPRADVDHAIEKAFQLWSNVTPLTFTKVSEGQADIMISFVRGDHRDNSPFTGPGGNLAHAFQPGPGIGGDAHFNEDERWTNNFREYNLHRVAAHELGHSLGLSHSTDIGALMYPSYTFSGDVQLAQDDIDGIQAIYGRSQNPVQPIGPQTPKACDSKLTFDAITTIRGEVMFFKDRFYMRTNPFYPEVELNFISVFWPQLPNGLEAAYEFADRDEVRFFKGNKYWAVQGQNVLHGYPKDIYSSFGFPRTVKHIDAALSEENTGKTYFFVANKYWRYDEYKRSMDPGYPKMIAHDFPGIGHKVDAVFMKDGFFYFFHGTRQYKFDPKTKRILTLQKANSWFNCRKN

SEQ ID NO: 157 - protein, 450 aa, Artificial Sequence
  MMP-1 mutant V227E
FPATLETQEQDVDLVQKYLEKYYNLKNDGRQVEKRRNSGPVVEKLKQMQEFFGLKVTGKPDAETLKVMKQPRCGVPDVAQFVLTEGNPRWEQTHLTYRIENYTPDLPRADVDHAIEKAFQLWSNVTPLTFTKVSEGQADIMISFVRGDHRDNSPFDGPGGNLAHAFQPGPGIGGDAHFDEDERWTNNFREYNLHRVAAHELGHSLGLSHSTDIGALMYPSYTFSGDEQLAQDDIDGIQAIYGRSQNPVQPIGPQTPKACDSKLTFDAITTIRGEVMFFKDRFYMRTNPFYPEVELNFISVFWPQLPNGLEAAYEFADRDEVRFFKGNKYWAVQGQNVLHGYPKDIYSSFGFPRTVKHIDAALSEENTGKTYFFVANKYWRYDEYKRSMDPGYPKMIAHDFPGIGHKVDAVFMKDGFFYFFHGTRQYKFDPKTKRILTLQKANSWFNCRKN

SEQ ID NO: 158 - protein, 450 aa, Artificial Sequence
  MMP-1 mutant G159V
FPATLETQEQDVDLVQKYLEKYYNLKNDGRQVEKRRNSGPVVEKLKQMQEFFGLKVTGKPDAETLKVMKQPRCGVPDVAQFVLTEGNPRWEQTHLTYRIENYTPDLPRADVDHAIEKAFQLWSNVTPLTFTKVSEGQADIMISFVRGDHRDNSPFDGPVGNLAHAFQPGPGIGGDAHFDEDERWTNNFREYNLHRVAAHELGHSLGLSHSTDIGALMYPSYTFSGDVQLAQDDIDGIQAIYGRSQNPVQPIGPQTPKACDSKLTFDAITTIRGEVMFFKDRFYMRTNPFYPEVELNFISVFWPQLPNGLEAAYEFADRDEVRFFKGNKYWAVQGQNVLHGYPKDIYSSFGFPRTVKHIDAALSEENTGKTYFFVANKYWRYDEYKRSMDPGYPKMIAHDFPGIGHKVDAVFMKDGFFYFFHGTRQYKFDPKTKRILTLQKANSWFNCRKN

SEQ ID NO: 159 - protein, 450 aa, Artificial Sequence
  MMP-1 mutant S208K
FPATLETQEQDVDLVQKYLEKYYNLKNDGRQVEKRRNSGPVVEKLKQMQEFFGLKVTGKPDAETLKVMKQPRCGVPDVAQFVLTEGNPRWEQTHLTYRIENYTPDLPRADVDHAIEKAFQLWSNVTPLTFTKVSEGQADIMISFVRGDHRDNSPFDGPGGNLAHAFQPGPGIGGDAHFDEDERWTNNFREYNLHRVAAHELGHSLGLKHSTDIGALMYPSYTFSGDVQLAQDDIDGIQAIYGRSQNPVQPIGPQTPKACDSKLTFDAITTIRGEVMFFKDRFYMRTNPFYPEVELNFISVFWPQLPNGLEAAYEFADRDEVRFFKGNKYWAVQGQNVLHGYPKDIYSSFGFPRTVKHIDAALSEENTGKTYFFVANKYWRYDEYKRSMDPGYPKMIAHDFPGIGHKVDAVFMKDGFFYFFHGTRQYKFDPKTKRILTLQKANSWFNCRKN

SEQ ID NO: 160 - protein, 450 aa, Artificial Sequence
  MMP-1 mutant D156T
FPATLETQEQDVDLVQKYLEKYYNLKNDGRQVEKRRNSGPVVEKLKQMQEFFGLKVTGKPDAETLKVMKQPRCGVPDVAQFVLTEGNPRWEQTHLTYRIENYTPDLPRADVDHAIEKAFQLWSNVTPLTFTKVSEGQADIMISFVRGDHRDNSPFTGPGGNLAHAFQPGPGIGGDAHFDEDERWTNNFREYNLHRVAAHELGHSLGLSHSTDIGALMYPSYTFSGDVQLAQDDIDGIQAIYGRSQNPVQPIGPQTPKACDSKLTFDAITTIRGEVMFFKDRFYMRTNPFYPEVELNFISVFWPQLPNGLEAAYEFADRDEVRFFKGNKYWAVQGQNVLHGYPKDIYSSFGFPRTVKHIDAALSEENTGKTYFFVANKYWRYDEYKRSMDPGYPKMIAHDFPGIGHKVDAVFMKDGFFYFFHGTRQYKFDPKTKRILTLQKANSWFNCRKN

SEQ ID NO: 161 - protein, 450 aa, Artificial Sequence
  MMP-1 mutant D179N
FPATLETQEQDVDLVQKYLEKYYNLKNDGRQVEKRRNSGPVVEKLKQMQEFFGLKVTGKPDAETLKVMKQPRCGVPDVAQFVLTEGNPRWEQTHLTYRIENYTPDLPRADVDHAIEKAFQLWSNVTPLTFTKVSEGQADIMISFVRGDHRDNSPFDGPGGNLAHAFQPGPGIGGDAHFNEDERWTNNFREYNLHRVAAHELGHSLGLSHSTDIGALMYPSYTFSGDVQLAQDDIDGIQAIYGRSQNPVQPIGPQTPKACDSKLTFDAITTIRGEVMFFKDRFYMRTNPFYPEVELNFISVFWPQLPNGLEAAYEFADRDEVRFFKGNKYWAVQGQNVLHGYPKDIYSSFGFPRTVKHIDAALSEENTGKTYFFVANKYWRYDEYKRSMDPGYPKMIAHDFPGIGHKVDAVFMKDGFFYFFHGTRQYKFDPKTKRILTLQKANSWFNCRKN

SEQ ID NO: 162 - protein, 370 aa, Artificial Sequence
  MMP-1 mutant G159V (mature form)
FVLTEGNPRWEQTHLTYRIENYTPDLPRADVDHAIEKAFQLWSNVTPLTFTKVSEGQADIMISFVRGDHRDNSPFDGPVGNLAHAFQPGPGIGGDAHFDEDERWTNNFREYNLHRVAAHELGHSLGLSHSTDIGALMYPSYTFSGDVQLAQDDIDGIQAIYGRSQNPVQPIGPQTPKACDSKLTFDAITTIRGEVMFFKDRFYMRTNPFYPEVELNFISVFWPQLPNGLEAAYEFADRDEVRFFKGNKYWAVQGQNVLHGYPKDIYSSFGFPRTVKHIDAALSEENTGKTYFFVANKYWRYDEYKRSMDPGYPKMIAHDFPGIGHKVDAVFMKDGFFYFFHGTRQYKFDPKTKRILTLQKANSWFNCRKN

SEQ ID NO: 163 - protein, 370 aa, Artificial Sequence
  MMP-1 mutant G159V/S208K (mature form)
FVLTEGNPRWEQTHLTYRIENYTPDLPRADVDHAIEKAFQLWSNVTPLTFTKVSEGQADIMISFVRGDHRDNSPFDGPVGNLAHAFQPGPGIGGDAHFDEDERWTNNFREYNLHRVAAHELGHSLGLKHSTDIGALMYPSYTFSGDVQLAQDDIDGIQAIYGRSQNPVQPIGPQTPKACDSKLTFDAITTIRGEVMFFKDRFYMRTNPFYPEVELNFISVFWPQLPNGLEAAYEFADRDEVRFFKGNKYWAVQGQNVLHGYPKDIYSSFGFPRTVKHIDAALSEENTGKTYFFVANKYWRYDEYKRSMDPGYPKMIAHDFPGIGHKVDAVFMKDGFFYFFHGTRQYKFDPKTKRILTLQKANSWFNCRKN

SEQ ID NO: 164 - protein, 370 aa, Artificial Sequence
  MMP-1 mutant D156T (mature form)
FVLTEGNPRWEQTHLTYRIENYTPDLPRADVDHAIEKAFQLWSNVTPLTFTKVSEGQADIMISFVRGDHRDNSPFTGPGGNLAHAFQPGPGIGGDAHFDEDERWTNNFREYNLHRVAAHELGHSLGLSHSTDIGALMYPSYTFSGDVQLAQDDIDGIQAIYGRSQNPVQPIGPQTPKACDSKLTFDAITTIRGEVMFFKDRFYMRTNPFYPEVELNFISVFWPQLPNGLEAAYEFADRDEVRFFKGNKYWAVQGQNVLHGYPKDIYSSFGFPRTVKHIDAALSEENTGKTYFFVANKYWRYDEYKRSMDPGYPKMIAHDFPGIGHKVDAVFMKDGFFYFFHGTRQYKFDPKTKRILTLQKANSWFNCRKN

SEQ ID NO: 165 - protein, 370 aa, Artificial Sequence
  MMP-1 mutant D179N (mature form)
FVLTEGNPRWEQTHLTYRIENYTPDLPRADVDHAIEKAFQLWSNVTPLTFTKVSEGQADIMISFVRGDHRDNSPFDGPGGNLAHAFQPGPGIGGDAHFNEDERWTNNFREYNLHRVAAHELGHSLGLSHSTDIGALMYPSYTFSGDVQLAQDDIDGIQAIYGRSQNPVQPIGPQTPKACDSKLTFDAITTIRGEVMFFKDRFYMRTNPFYPEVELNFISVFWPQLPNGLEAAYEFADRDEVRFFKGNKYWAVQGQNVLHGYPKDIYSSFGFPRTVKHIDAALSEENTGKTYFFVANKYWRYDEYKRSMDPGYPKMIAHDFPGIGHKVDAVFMKDGFFYFFHGTRQYKFDPKTKRILTLQKANSWFNCRKN

SEQ ID NO: 166 - protein, 370 aa, Artificial Sequence
  MMP-1 mutant D156T/D179N (mature form)
FVLTEGNPRWEQTHLTYRIENYTPDLPRADVDHAIEKAFQLWSNVTPLTFTKVSEGQADIMISFVRGDHRDNSPFTGPGGNLAHAFQPGPGIGGDAHFNEDERWTNNFREYNLHRVAAHELGHSLGLSHSTDIGALMYPSYTFSGDVQLAQDDIDGIQAIYGRSQNPVQPIGPQTPKACDSKLTFDAITTIRGEVMFFKDRFYMRTNPFYPEVELNFISVFWPQLPNGLEAAYEFADRDEVRFFKGNKYWAVQGQNVLHGYPKDIYSSFGFPRTVKHIDAALSEENTGKTYFFVANKYWRYDEYKRSMDPGYPKMIAHDFPGIGHKVDAVFMKDGFFYFFHGTRQYKFDPKTKRILTLQKANSWFNCRKN

SEQ ID NO: 167 - protein, 370 aa, Artificial Sequence
  MMP-1 mutant V227E (mature form)
FVLTEGNPRWEQTHLTYRIENYTPDLPRADVDHAIEKAFQLWSNVTPLTFTKVSEGQADIMISFVRGDHRDNSPFDGPGGNLAHAFQPGPGIGGDAHFDEDERWTNNFREYNLHRVAAHELGHSLGLSHSTDIGALMYPSYTFSGDEQLAQDDIDGIQAIYGRSQNPVQPIGPQTPKACDSKLTFDAITTIRGEVMFFKDRFYMRTNPFYPEVELNFISVFWPQLPNGLEAAYEFADRDEVRFFKGNKYWAVQGQNVLHGYPKDIYSSFGFPRTVKHIDAALSEENTGKTYFFVANKYWRYDEYKRSMDPGYPKMIAHDFPGIGHKVDAVFMKDGFFYFFHGTRQYKFDPKTKRILTLQKANSWFNCRKN
